(19) United States
(12) Patent Application Publication
(10) Pub. No.: US 2024/0035029 A1
(43) Pub. Date: Feb. 1, 2024

(54) RNA COMPOSITIONS AND METHODS FOR INHIBITING LIPOPROTEIN(A)

(71) Applicant: SANOFI, Paris (FR)

(72) Inventors: Bodo BRUNNER, Frankfurt (DE); Bertrand FROTTIER, Paris (FR); Etienne GUILLOT, Paris (FR); Mike HELMS, Frankfurt am Main (DE); Armin HOFMEISTER, Frankfurt am Main (DE); Kerstin JAHN-HOFMANN, Frankfurt am Main (DE); Sabine SCHEIDLER, Frankfurt am Main (DE)

(21) Appl. No.: 18/248,974

(22) PCT Filed: Oct. 15, 2021
(86) PCT No.: PCT/EP2021/078569

§ 371 Date: Apr. 13, 2023

(30) Foreign Application Priority Data
Oct. 16, 2020 (EP) 20306222.9

(51) Int. Cl. C12N 15/113

(52) U.S. Cl. CPC C12N 15/113; C12N 2310/14; C12N 2310/351; C12N 2310/323; C12N 2310/317; C12N 2310/314

(57) ABSTRACT

The present disclosure relates to dsRNAs targeting LPA mRNA and modulating Lp(a) plasma levels, and methods of treating one or more conditions associated with LPA gene expression.

### SEQUENCE LISTING

[0001] Nucleic acid sequences are disclosed in the present specification that serve as references. The same sequences are also presented in a sequence listing formatted according to standard requirements for the purpose of patent matters. In case of any sequence discrepancy with the standard sequence listing, the sequences described in the present specification shall be the reference.

### FIELD OF THE INVENTION

[0002] The present invention relates to dsRNAs targeting LPA mRNA and modulating Lp(a) plasma levels, and methods of treating one or more conditions associated with LPA gene expression

### BACKGROUND OF THE INVENTION

[0003] Lipoproteins are lipid protein particles that play a key role in transporting lipids in plasma. These particles have a single-layer phospholipid and cholesterol membrane with embedded apolipoproteins (proteins that bind lipids) such as apoA, apoB, apoC, and apoE. The membrane encapsulates lipids being transported. Because lipids are not soluble in water, lipoproteins effectively serve as emulsifiers.

[0004] Lipoprotein(a) or Lp(a), found only in humans and in old-world monkeys, comprises a low density lipoprotein (LDL) particle. Lp(a) differs from other lipoproteins by the presence of a unique apolipoprotein, apolipoprotein(a) [apo(a)], which is linked to apoB₁₀₀ on the LDL particle outer surface through a disulfide bond (see, e.g., Kronenberg and Utermann, J Intern Med. (2013) 273(1):6-30); Guerra et al., Circulation. (2005) 111:1471-9). Apo(a) is expressed primarily in the liver and contains an inactive peptidase domain. Apo(a) is encoded by the highly polymorphic LPA gene. A variable number of kringle (K) IV type 2 repeats in the gene leads to a wide range of apo(a) isoform sizes. The LPA gene evolved from the plasminogen gene (PLG) and the two genes have highly homologous sequences (Kronenberg, supra).

[0005] Plasma Lp(a) levels vary by almost 1000-fold among individuals, with approximately of the population having highly elevated Lp(a) levels (approximately ≥50 mg/dL). See, e.g., Hopewell et al., J Intern Med. (2013) 273(1):260-8; Wilson et al., Clinical Lipidology (2019) 13(3):374-92. High plasma Lp(a) levels and small apo(a) isoform sizes are associated with an increased risk of cardiovascular diseases, including coronary heart disease, myocardial infarction, stroke, peripheral arterial disease, calcific aortic valve disease, and atherosclerosis.

[0006] WO 2019/092283 and WO 2020/099476 both disclose nucleic acids for inhibiting expression of LPA in a cell. Also, WO 2014/179625 discloses compositions and methods for modulating apolipoprotein(a) expression.

[0007] Double-stranded RNA molecules (dsRNAs) have been shown to block gene expression in a highly conserved regulatory mechanism known as RNA interference (RNAi). This appears to be a different mechanism of action from that of single-stranded oligonucleotides such as antisense oligonucleotides, antimiRs, and antagomiRs. In RNA interference technology, double-stranded RNAs, such as small interfering RNAs (siRNAs), bind to the RNA-induced silencing complex (“RISC”), where one strand (the “passenger strand” or “sense strand”) is displaced and the remaining strand (the “guide strand” or “antisense strand”) cooperates with RISC to bind a complementary RNA (the target RNA). Once bound, the target RNA is cleaved by RNA endonuclease Argonaute (AGO) in RISC and then further degraded by RNA exonucleases. RNAi has now been used to develop a new class of therapeutic agents for treating disorders caused by the aberrant or unwanted expression of a gene.

[0008] Due to the importance of Lp(a) in transporting cholesterol and oxidized phospholipids, and in providing lysophosphatidic acid, as well as the prevalence of diseases associated with elevated Lp(a) and atherosclerosis-promoting lipids, there is an urgent need to identify inhibitors of LPA expression and to test such inhibitors for efficacy and unwanted side effects such as cytotoxicity.

### SUMMARY OF THE INVENTION

[0009] The present disclosure provides a double-stranded ribonucleic acid (dsRNA) that inhibits expression of a human LPA gene by targeting a target sequence on an RNA transcript of the LPA gene, wherein the dsRNA comprises a sense strand comprising a sense sequence, and an antisense strand comprising an antisense sequence, the target sequence is nucleotides 220-238, 223-241, 302-320, 1236-1254, 2946-2964, 2953-2971, 2954-2972, 2958-2976, 2959-2977, 4635-4653, 4636-4654, 4639-4657, 4842-4860, 4980-4998, 4982-5000, 6385-6403, or 6470-6488 of SEQ ID NO: 1632, and wherein the sense sequence is at least 90% identical to the target sequence. In some embodiments, the sense strand and antisense strand are complementary to each other over a region of 15-25 contiguous nucleotides. In some embodiments, the sense strand and the antisense strand are no more than 30 nucleotides in length. In particular embodiments, the target sequence is nucleotides 2958-2976, 4639-4657, or 4982-5000 of SEQ ID NO: 1632.

[0010] Most preferred target sequences are nucleotides 2958-2976, 4639-4657 and 4982-5000.

[0011] In some embodiments, one or both strands of the dsRNA comprise one or more compounds having the structure of

[chemical structure]

wherein:
[0012] B is a heterocyclic nucleobase,
[0013] one of L1 and L2 is an internucleoside linking group linking the compound of formula (I) to said strand(s) and the other of L1 and L2 is H, a protecting group, a phosphorus moiety or an internucleoside linking group linking the compound of formula (I) to said strand(s),
[0014] Y is O, NH, NR1 or N—C(═O)—R1, wherein R1 is:
   [0015] a (C1-C20) alkyl group, optionally substituted by one or more groups selected from an halogen atom, a (C1-C6) alkyl group, a (C3-C8) cycloalkyl group, a (C3-C14) heterocycle, a (C6-C14) aryl group, a (C5-C14) heteroaryl group, —O—Z1, —N(Z1)(Z2), —S—Z1, —CN, —C(=J)-O—Z1, —O—C(=J)-Z1, —C(=J)-N(Z1)(Z2), and —N(Z1)-C(=J)-Z2, wherein J is O or S,
      each of Z1 and Z2 is, independently, H, a (C1-C6) alkyl group, optionally substituted by one or more groups selected from a halogen atom and a (C1-C6) alkyl group,
[0016] a (C3-C8) cycloalkyl group, optionally substituted by one or more groups selected from a halogen atom and a (C1-C6) alkyl group,
[0017] a group —[C(═O)]m-R2-(O—CH₂—CH₂)p-R3, wherein
   m is an integer meaning 0 or 1,
   p is an integer ranging from 0 to 10,
   R2 is a (C1-C20) alkylene group optionally substituted by a (C1-C6) alkyl group, —O—Z3, —N(Z3)(Z4), —S—Z3, —CN, —C(═K)—O—Z3, —O—C(═K)—Z3, —C(═K)—N(Z3)(Z4), or —N(Z3)-C(═K)—Z4, wherein

### K is O or S,

[0018] each of Z3 and Z4 is, independently, H, a (C1-C6) alkyl group, optionally substituted by one or more groups selected from a halogen atom and a (C1-C6) alkyl group, and
R3 is selected from the group consisting of a hydrogen atom, a (C1-C6) alkyl group, a (C1-C6) alkoxy group, a (C3-C8) cycloalkyl group, a (C3-C14) heterocycle, a (C6-C14) aryl group or a (C5-C14) heteroaryl group,
or R3 is a cell targeting moiety,
[0019] X1 and X2 are each, independently, a hydrogen atom, a (C1-C6) alkyl group, and
[0020] each of Ra, Rb, Rc and Rd is, independently, H or a (C1-C6) alkyl group, or a pharmaceutically acceptable salt thereof.

[0021] In another aspect, the present disclosure provides a pharmaceutical composition comprising the present dsRNA and a pharmaceutically acceptable excipient, and the dsRNA and pharmaceutical composition for use in inhibiting LPA expression, reducing Lp(a) levels, or treating an Lp(a)-associated condition in a human in need thereof. In some embodiments, the human has, or is at risk of having, a lipid metabolism disorder or a cardiovascular disease (CVD). In further embodiments, the human has, or is at risk of having, hypercholesterolemia, dyslipidemia, myocardial infarction, atherosclerotic cardiovascular disease, atherosclerosis, peripheral artery disease, calcific aortic valve disease, thrombosis, or stroke.

### BRIEF DESCRIPTION OF THE DRAWINGS

[0022] FIGS. 1A and 1B are graphs showing correlation analyses of LPA siRNA screening results. A screening library comprising 299 LPA siRNAs was tested at 1 nM (FIG. 1A) or 10 nM (FIG. 1B) in two independent experiments in Hep3B cells transiently transfected with a pmirGLO-LPA dual luciferase reporter plasmid.

[0023] FIGS. 2A-C are graphs showing RT-qPCR analysis of LPA mRNA expression in human HepG2-LPA cells (which stably overexpressed a human LPA cDNA construct) (FIG. 2A), primary transgenic apo(a) mouse hepatocytes (FIG. 2B), or primary cynomolgus hepatocytes (FIG. 2C), following treatment with 34 selected test siRNAs at 1 or 10 nM. Expression of mRNA is represented relative to cells treated with a LV2 non-targeting siRNA control. Error bars indicate standard deviation. LV2 and LV3: negative control siRNA sequences that do not target any human, cynomolgus monkey, or rodent mRNA transcript. s8263 and s8264: positive controls, which are human LPA tool siRNAs (Ambion, now Thermo Fisher).

[0024] FIGS. 3A-C are graphs showing RT-qPCR analysis of plasminogen (PLG) mRNA expression in human HuH-7 cells (FIG. 3A), primary human hepatocytes (FIG. 3B), or primary cynomolgus hepatocytes (FIG. 3C) following treatment with 34 selected test siRNAs as indicated at 1 or 10 nM. Expression of mRNA is represented relative to cells treated with a LV2 non-targeting siRNA control. Error bars indicate standard deviation.

[0025] FIG. 4 is a graph depicting cytotoxic effects of 34 selected test siRNAs in human HepG2-LPA cells. Cells were treated with siRNAs as indicated at 5 or 50 nM before being analyzed for viability (CellTiter-Glo® assay) and toxicity (ToxiLight™ assay). Ratios of the resulting readings are shown relative to results for a LV2 non-targeting siRNA control. Error bars indicate standard deviation. “AllStars Cell Death”: AllStars Hs Cell Death Control siRNA (Qiagen).

[0026] FIG. 5 is a graph depicting relative amount of PLG protein secreted into the supernatant of human hepatocytes treated with indicated concentrations (0.1, 1, or 10 μM) of 17 selected LPA GalNAc-siRNAs under free uptake conditions as determined by ELISA assay. Protein expression is represented relative to cells treated with a LV2 non-targeting siRNA control at 1 μM (dashed line). Error bars indicate standard deviation.

[0027] FIG. 6 is a graph depicting analysis of cytotoxic siRNA effects in human HepG2-LPA cells. Cells were treated with 17 selected LPA GalNAc-siRNAs as indicated at 5 and 50 nM before being analyzed for viability (CellTiter-Glo assay) and toxicity (ToxiLight assay). Ratios of the resulting readings are shown relative to results of a LV2 non-targeting siRNA control (dashed line). Error bars indicate standard deviation.

[0028] FIG. 7 is a graph depicting the amount of interferon α2a (IFNα2a) protein released into the supernatant of human peripheral blood mononuclear cells (PBMCs) isolated from three different donors and transfected with 100 nM concentration of 17 selected LPA GalNAc-siRNAs or controls. Protein concentration was determined by ELISA. Error bars indicate standard deviation.

[0029] FIG. 8 is a graph depicting relative amounts of serum apo(a) protein levels in apo(a) transgenic mice treated subcutaneously with a single dose of 17 selected LPA GalNAc-siRNAs at mg/kg at day 0. Protein expression is represented relative to animals treated with a PBS vehicle control. Human apo(a) levels were quantified by ELISA, error bars indicate standard error of the mean (SEM).

[0030] FIG. 9 is a panel of graphs showing RNA-Seq whole transcriptome analysis of primary human hepatocytes from two different donors treated with 5 μM of three selected GalNAc-siRNAs. The number of differentially up- and downregulated genes as compared to a LV2 GalNAc-siRNA non-silencing control are shown applying the filter criteria—absolute foldchange>1.5 and FDR (false discovery rate)<0.05. LPA being the most downregulated transcript in each comparison is indicated by a dashed circle.

[0031] FIG. 10 is a graph depicting residual LPA mRNA expression levels normalized to a LV2 non-silencing control in primary hepatocytes isolated from apo(a) transgenic mice treated with 1 nM and 5 nM siRNAs from optimization libraries based on selected sequences siLPA #0307, siLPA #0311, and siLPA #0314.

[0032] FIGS. 11A-C are graphs showing relative amounts of serum apo(a) levels in apo(a) transgenic mice treated subcutaneously with a single dose of 41 optimized LPA GalNAc-siRNAs and respective parent molecules at 3 mg/kg at day 0. FIGS. 11A-C represent data for optimized LPA GalNAc-siRNAs based on parent sequences siLPA #0307; siLPA #0311, and siLPA #0314, respectively. Protein expression is represented relative to animals treated with a PBS vehicle control. Human apo(a) levels were quantified by ELISA, error bars indicate SEM.

[0033] FIG. 12 is a graph showing the amount of interferon α2a (IFNα2a) protein released into the supernatant of human peripheral blood mononuclear cells (PBMCs) isolated from three different donors and transfected with 100 nM concentration of 41 optimized LPA GalNAc-siRNAs or controls. Protein concentration was determined by ELISA. Error bars indicate standard deviation.

[0034] FIG. 13 is a graph showing RT-qPCR analysis of LPA mRNA expression in primary cynomolgus hepatocytes treated under free uptake conditions with 41 optimized LPA GalNAc-siRNAs and respective parent lead molecules as indicated at 100 nM and 1 μM concentration, respectively. mRNA expression is represented relative to cells treated with a LV2 non-targeting GalNAc-siRNA control (dashed line). Error bars indicate standard deviation.

[0035] FIG. 14 is a graph showing RT-qPCR analysis of PLG mRNA expression in primary human hepatocytes treated under free uptake conditions with 41 optimized LPA siRNA-GalNAc reagents and respective parent lead molecules as indicated at 10 nM, 100 nM and 1 μM concentration, respectively. mRNA expression is represented relative to cells treated with a LV2 non-targeting siRNA-GalNAc control (dashed line). Error bars indicate standard deviation.

### DETAILED DESCRIPTION OF THE INVENTION

[0036] The present disclosure provides novel double-stranded RNAs (dsRNAs) that inhibit expression of an LPA gene. In some embodiments, the dsRNAs are small interfering RNAs (siRNAs). Besides nucleic acids, the present dsRNAs may comprise additional moieties such as targeting moieties that facilitate the delivery of the dsRNAs to a targeted tissue. The dsRNAs can be used to treat conditions such as cardiovascular diseases. Unless otherwise stated, “apo(a)” refers to a human LPA gene product. An mRNA sequence of 6489 nucleotides in length of a human apo(a) protein is available under NCBI Reference Sequence No. NM_005577.2 (SEQ ID NO: 1632). An mRNA sequence of 6414 nucleotides in length, lacking the 75 first nucleotides located at the 5′ end of SEQ ID NO. 1632, of a human apo(a) protein is also available under NCBI Reference Sequence No. NM_005577.3 (SEQ ID NO: 1627) and its polypeptide sequence is available under NCBI Reference Sequence No. NP_005568.2 (SEQ ID NO: 1628). In certain embodiments, the present disclosure refers to cynomolgus apo(a). An mRNA sequence of a cynomolgus apo(a) protein is available under NCBI Reference Sequence No. XM_015448517 (SEQ ID NO: 1629) and its polypeptide sequence is available under NCBI Reference Sequence No. XP_015304003.1 (SEQ ID NO: 1630).

[0037] A dsRNA of the present disclosure, such as one comprising a conjugated GalNAc moiety, may have one or more of the following properties: (i) has a half-life of at least 24, 28, 32, 48, 52, 56, 60, 72, 96, or 168 hours in 50% mouse serum; (ii) does not increase production of interferon α secreted from human primary PMBCs; (iii) has an IC₅₀ value of from, e.g., 1 pM to 100 nM, for inhibition of human LPA mRNA expression in transgenic mouse hepatocytes or primary human or cynomolgus liver cells; and (iv) reduces protein levels of apo(a) by at least 75%, 80%, 85%, 90%, 95%, 96%, 97%, 98%, or 99% in vivo in FVB/N mice expressing human LPA.

[0038] In some embodiments, a dsRNA of the present disclosure comprising a conjugated GalNAc moiety has at least one of the following properties: (i) has a half-life of at least 24 hours in 50% mouse serum; (ii) does not increase production of interferon α secreted from human primary PMBCs, (iii) has an IC₅₀ value of from, e.g., 1 pM to 50 nM, for inhibition of human LPA mRNA expression in transgenic mouse hepatocytes or primary human or cynomolgus liver cells; and (iv) reduces protein levels of human apo(a) by at least 80% in vivo in FVB/N mice expressing human LPA. In certain embodiments, the dsRNA has all of said properties.

[0039] It will be understood by the person skilled in the art that the dsRNAs described herein do not occur in nature (“isolated” dsRNAs).

### I. Double-Stranded RNAs

[0040] Certain aspects of the present disclosure relate to double-stranded ribonucleic acid (dsRNA) molecules targeting LPA mRNA. As used herein, the term “double-stranded RNA” or “dsRNA” refers to an oligoribonucleotide molecule comprising a duplex structure having two anti-parallel and substantially complementary nucleic acid strands. The two strands forming the duplex structure may be different portions of one larger RNA molecule, or they may be on separate RNA molecules. When the two strands are on separate RNA molecules, the dsRNA structure may function as short interfering RNA (siRNA). Where the two strands are part of one larger molecule and are connected by an uninterrupted chain of nucleotides between the 3′-end of a first strand and the 5′-end of a second strand, the connecting RNA chain is referred to as a “hairpin loop” and the RNA molecule may be termed “short hairpin RNA,” or “shRNA.” The RNA strands may have the same or a different number of nucleotides. In addition to the duplex structure, a dsRNA may comprise overhangs of one or more (e.g., 1, 2 or 3) nucleotides.

[0041] As used herein, the term “polynucleotide” refers to a polymeric form of nucleotides of at least 10 bases in length, either ribonucleotides or deoxyribonucleotides or a modified form of either type of nucleotide. The term includes single and double stranded forms.

[0042] A “dsRNA” may include naturally occurring ribonucleotides, and/or chemically modified analogs thereof. As used herein, “dsRNAs” are not limited to those with ribose-containing nucleotides. A dsRNA herein encompasses a double-stranded polynucleotide molecule where the ribose moiety in some or all of its nucleotides has been replaced by another moiety, so long as the resultant double-stranded molecule can inhibit the expression of a target gene by RNA interference. The dsRNA may also include one or more, but not more than 60% (e.g., not more than 50%, 40%, 30%, 20%, or 10%) deoxyribonucleotides or chemically modified analogs thereof.

[0043] A dsRNA of the present disclosure comprises a sense strand comprising a sense sequence, and an antisense strand comprising an antisense sequence, wherein the sense strand and the antisense strand are sufficiently complementary to hybridize to form a duplex structure. The term “antisense sequence” refers to a sequence that is substantially or fully complementary, and binds under physiological conditions, to a target RNA sequence in a cell. A “target sequence” refers to a nucleotide sequence on an RNA molecule (e.g., a primary RNA transcript or a messenger RNA transcript) transcribed from a target gene, e.g., an LPA gene. The term “sense sequence” refers to a sequence that is substantially or fully complementary to the antisense sequence.

[0044] The LPA mRNA-targeting dsRNA of the present disclosure comprises a sense strand comprising a sense sequence and an antisense strand comprising an antisense sequence, wherein the sense and antisense sequences are substantially or fully complementary to each other. Unless otherwise indicated, the term “complementary” refers herein to the ability of a polynucleotide comprising a first contiguous nucleotide sequence, under certain conditions, e.g., physiological conditions, to hybridize to and form a duplex structure with another polynucleotide comprising a second contiguous nucleotide sequence. This may include base-pairing of the two polynucleotides over the entire length of the first or second contiguous nucleotide sequence; in this case, the two nucleotide sequences are considered “fully complementary” to each other. For example, in a case where a dsRNA comprises a first oligonucleotide 21 nucleotides in length and a second oligonucleotide 23 nucleotides in length, and where the two oligonucleotides form 21 contiguous base-pairs, the two oligonucleotides may be referred to as “fully complementary” to each other. Where a first polynucleotide sequence is referred to as “substantially complementary” to a second polynucleotide sequence, the two sequences may base-pair with each other over 80% or more (e.g., 90% or more) of their length of hybridization, with no more than 20% (e.g., no more than 10%) of mismatching base-pairs (e.g., for a duplex of 20 nucleotides, no more than 4 or no more than 2 mismatched base-pairs). Where two oligonucleotides are designed to form a duplex with one or more single-stranded overhangs, such overhangs shall not be regarded as mismatches for the determination of complementarity. Complementarity of two sequences may be based on Watson-Crick base-pairs and/or non-Watson-Crick base-pairs. As used herein, a polynucleotide which is “substantially complementary to at least part of” an mRNA refers to a polynucleotide which is substantially complementary to a contiguous portion of an mRNA of interest (e.g., an mRNA encoding LPA).

[0045] In some embodiments, the LPA-targeting dsRNA is an siRNA where the sense and antisense strands are not covalently linked to each other. In some embodiments, the sense and antisense strands of the LPA-targeting dsRNA are covalently linked to each other, e.g., through a hairpin loop (such as in the case of shRNA), or by means other than a hairpin loop (such as by a connecting structure referred to as a “covalent linker”).

[0046] I.1 Lengths

[0047] In some embodiments, each of the sense sequence (in the sense strand) and the antisense sequence (in the antisense strand) is 9-30 nucleotides in length. For example, each sequence can be any of a range of nucleotide lengths having an upper limit of 21, 22, 23, 24, 25, 26, 27, 28, 29, or 30 and an independently selected lower limit of 9, 10, 11, 12, 13, 14, 15, 16, 17, 18, 19, or 20. In some embodiments, the number of nucleotides in each sequence may be 15-25 (i.e., 15 to 25 nucleotides in each sequence), 15-30, 16-29, 17-28, 18-28, 18-27, 18-26, 18-25, 18-24, 18-23, 18-22, 18-21, 18-20, 19-30, 19-29, 19-28, 19-27, 19-26, 19-25, 19-24, 19-23, 19-22, or 19-21.

[0048] In some embodiments, each sequence is greater than 8, 9, 10, 11, 12, 13, 14, 15, 16, 17, 18, 19, 20, 21, 22, 23, 24, 25, 26, 27, 28, 29, or 30 nucleotides in length. In some embodiments, each sequence is less than 21, 22, 23, 24, 25, 26, 27, 28, 29, 30, or 31 nucleotides in length. In some embodiments, each sequence is 9, 10, 11, 12, 13, 14, 15, 16, 17, 18, 19, 20, 21, 22, 23, 24, 25, 26, 27, 28, 29, or 30 nucleotides in length.

[0049] In some embodiments, the sense and antisense sequences are each at least 15 and no greater than 25 nucleotides in length. In some embodiments, the sense and antisense sequences are each at least 19 and no greater than 23 nucleotides in length. For example, the sequences are 15, 16, 17, 18, 19, 20, 21, 22, 23, 24, or 25 nucleotides in length.

[0050] In some embodiments, the LPA mRNA-targeting dsRNA has sense and antisense strands of the same length or different lengths. For example, the sense strand may be 1, 2, 3, 4, 5, 6, or 7 nucleotides longer than the antisense strand. Alternatively, the sense strand may be 1, 2, 3, 4, 5, 6, or 7 nucleotides shorter than the antisense strand.

[0051] In some embodiments, each of the sense strand and the antisense strand is 9-36 nucleotides in length. For example, each strand can be any of a range of nucleotide lengths having an upper limit of 21, 22, 23, 24, 25, 26, 27, 28, 29, 30, 31, 32, 33, 34, 35, or 36 and an independently selected lower limit of 9, 10, 11, 12, 13, 14, 15, 16, 17, 18, 19, or 20. In some embodiments, the number of nucleotides in each strand may be 15-25, 15-30, 16-29, 17-28, 18-28, 18-27, 18-26, 18-18-24, 18-23, 18-22, 18-21, 18-20, 19-30, 19-29, 19-28, 19-27, 19-26, 19-25, 19-24, 19-23, 19-22, or 19-21.

[0052] In some embodiments, each strand is greater than 8, 9, 10, 11, 12, 13, 14, 15, 16, 17, 18, 19, 20, 21, 22, 23, 24, 25, 26, 27, 28, 29, or 30 nucleotides in length. In some embodiments, each strand is less than 20, 21, 22, 23, 24, 25, 26, 27, 28, 29, 30, 31, 32, 33, 34, 35, 36, or 37 nucleotides in length. In some embodiments, each strand is 9, 10, 11, 12, 13, 14, 15, 16, 17, 18, 19, 20, 21, 22, 23, 24, 25, 26, 27, 28, 29, 30, 31, 32, 33, 34, 35, or 36 nucleotides in length.

[0053] In some embodiments, the sense and antisense strands are each at least 15 and no greater than 25 nucleotides in length. In some embodiments, the sense and antisense strands are each at least 19 and no greater than 23 nucleotides in length. For example, the strands are 19, 20, 21, 22, or 23 nucleotides in length.

[0054] In some embodiments, the sense strand may have 21, 22, 23, or 24 nucleotides, including any modified nucleotides, while the antisense strand may have 21 nucleotides, including any modified nucleotides; in certain embodiments, the sense strand may have a sense sequence having 17, 18, or 19 nucleotides, while the antisense strand may have an antisense sequence having 19 nucleotides.

[0055] I.2 Overhangs

[0056] In some embodiments, a dsRNA of the present disclosure comprises one or more overhangs at the 3′-end, 5′-end, or both ends of one or both of the sense and antisense strands. In some embodiments, the one or more overhangs improve the stability and/or inhibitory activity of the dsRNA.

[0057] “Overhang” refers herein to the unpaired nucleotide(s) that protrude from the duplex structure of a dsRNA when a 3′ end of a first strand of the dsRNA extends beyond the 5′ end of a second strand, or vice versa. “Blunt end” means that there are no unpaired nucleotides at that end of the dsRNA, i.e., no nucleotide overhang. A “blunt-ended” dsRNA is a dsRNA that is double-stranded over its entire length, i.e., no nucleotide overhang at either end of the duplex molecule. Chemical caps or non-nucleotide chemical moieties conjugated to the 3′ end and/or the 5′ end of a dsRNA are not considered herein in determining whether a dsRNA has an overhang or not.

[0058] In some embodiments, an overhang comprises one or more, two or more, three or more, or four or more nucleotides. For example, the overhang may comprise 1, 2, 3, or 4 nucleotides.

[0059] In some embodiments, an overhang of the present disclosure comprises one or more nucleotides (e.g., ribonucleotides or deoxyribonucleotides, naturally occurring or chemically modified analogs thereof). In some embodiments, the overhang comprises one or more thymines or chemically modified analogs thereof. In certain embodiments, the overhang comprises one or more thymines.

[0060] In some embodiments, the dsRNA comprises an overhang located at the 3′-end of the antisense strand. In some embodiments, the dsRNA comprises a blunt end at the 5′-end of the antisense strand. In some embodiments, the dsRNA comprises an overhang located at the 3′-end of the antisense strand and a blunt end at the 5′-end of the antisense strand. In some embodiments, the dsRNA comprises an overhang located at the 3′-end of the sense strand. In some embodiments, the dsRNA comprises a blunt end at the 5′-end of the sense strand. In some embodiments, the dsRNA comprises an overhang located at the 3′-end of the sense strand and a blunt end at the 5′-end of the sense strand. In some embodiments, the dsRNA comprises overhangs located at the 3′-end of both the sense and antisense strands of the dsRNA.

[0061] In some embodiments, the dsRNA comprises an overhang located at the 5′-end of the antisense strand. In some embodiments, the dsRNA comprises a blunt end at the 3′-end of the antisense strand. In some embodiments, the dsRNA comprises an overhang located at the 5′-end of the antisense strand and a blunt end at the 3′-end of the antisense strand. In some embodiments, the dsRNA comprises an overhang located at the 5′-end of the sense strand. In some embodiments, the dsRNA comprises a blunt end at the 3′-end of the sense strand. In some embodiments, the dsRNA comprises an overhang located at the 5′-end of the sense strand and a blunt end at the 3′-end of the sense strand. In some embodiments, the dsRNA comprises overhangs located at both the 5′-end of the sense and antisense strands of the dsRNA.

[0062] In some embodiments, the dsRNA comprises an overhang located at the 3′-end of the antisense strand and an overhang at the 5′-end of the antisense strand. In some embodiments, the dsRNA comprises an overhang located at the 3′-end of the sense strand and an overhang at the 5′-end of the sense strand.

[0063] In some embodiments, the dsRNA has two blunt ends.

[0064] In some embodiments, the overhang is the result of the sense strand being longer than the antisense strand. In some embodiments, the overhang is the result of the antisense strand being longer than the sense strand. In some embodiments, the overhang is the result of sense and antisense strands of the same length being staggered. In some embodiments, the overhang forms a mismatch with the target mRNA. In some embodiments, the overhang is complementary to the target mRNA.

[0065] In some embodiments, one or both of the sense strand and the antisense strand of the dsRNA further comprise:
[0066] a) a 5′ overhang comprising one or more nucleotides; and/or
[0067] b) a 3′ overhang comprising one or more nucleotides.

[0068] In some embodiments, an overhang in the dsRNA comprises two or three nucleotides.

[0069] In certain embodiments, a dsRNA of the present disclosure contains a sense strand having the sequence of 5′-CCA-[sense sequence]-invdT, and the antisense strand having the sequence of 5′-[antisense sequence]-dTdT-3′, where the trinucleotide CCA may be modified (e.g., 2′-O-Methyl-C and 2′-O-Methyl-A).

[0070] I.3 Target and dsRNA Sequences

[0071] The antisense strand of a dsRNA of the present disclosure comprises an antisense sequence that may be substantially or fully complementary to a target sequence of 12-30 nucleotides in length in an LPA RNA (e.g., an mRNA). For example, the target sequence can be any of a range of nucleotide lengths having an upper limit of 19, 20, 21, 22, 23, 24, 25, 26, 27, 28, 29, or 30 and an independently selected lower limit of 12, 13, 14, 15, 16, 17, 18, or 19. In some embodiments, the number of nucleotides in the target sequence may be 15-25, 15-30, 16-29, 17-28, 18-28, 18-27, 18-26, 18-25, 18-24, 18-23, 18-22, 18-21, 18-20, 19-30, 19-29, 19-28, 19-27, 19-26, 19-25, 19-24, 19-23, 19-22, or 19-21.

[0072] In some embodiments, the target sequence is greater than 12, 13, 14, 15, 16, 17, 18, 19, or 20 nucleotides in length. In some embodiments, the target sequence is less than 21, 22, 23, 24, 26, 27, 28, 29, or 30 nucleotides in length. In some embodiments, the target sequence is 12, 13, 14, 15, 16, 17, 18, 19, 20, 21, 22, 23, 24, 25, 26, 27, 28, 29, or 30 nucleotides in length. In certain embodiments, the target sequence is at least 15 and no greater than 25 nucleotides in length; for example, at least 19 and no greater than 23 nucleotides in length, or 15, 16, 17, 18, 19, 20, 21, 22, 23, 24, or 25 nucleotides in length.

[0073] The target sequence may be in the 5′ noncoding region, the coding region, or the 3′ noncoding region of the LPA mRNA transcript. The target sequence may also be located at the junction of the coding and noncoding regions.

[0074] In some embodiments, the dsRNA antisense strand comprises an antisense sequence having one or more mismatch (e.g., one, two, three, or four mismatches) to the target sequence. In certain embodiments, the antisense sequence is fully complementary to the corresponding portion in the human LPA mRNA sequence and is fully complementary or substantially complementary (e.g., comprises at least one or two mismatches) to the corresponding portion in a cynomolgus LPA mRNA sequence. One advantage of such dsRNAs is to allow pre-clinical in vivo studies of the dsRNAs in non-human primates such as cynomolgus monkeys. In certain embodiments, the dsRNA sense strand comprises a sense sequence that is at least 70%, 75%, 80%, 85%, 90%, 95%, 96%, 97%, 98%, or 99% identical to the target sequence (e.g., in human or cynomolgus LPA mRNA).

[0075] In some embodiments, the target sequence in a human LPA mRNA sequence (SEQ ID NO: 1632) has the start and end nucleotide positions at or around (e.g., within 3 nucleotides of) the following nucleotides: 220 and 238, 223 and 241, 302 and 320, 1236 and 1254, 2946 and 2964, 2953 and 2971, 2954 and 2972, 2958 and 2976, 2959 and 2977, 4635 and 4653, 4636 and 4654, 4639 and 4657, 4842 and 4860, 4980 and 4998, 4982 and 5000, 6385 and 6403, or 6470 and 6488, respectively. In certain embodiments, the target sequence corresponds to nucleotide positions 2958-2976, 4639-4657, or 4982-5000 of the human LPA mRNA sequence, where the start and end positions may vary within 3 nucleotides of the numbered positions. In some embodiments, the target sequence is a sequence listed in Table 1 as a sense sequence, or a sequence that includes at least 80% nucleotides (e.g., at least 90%) of the listed sequence.

[0076] In some embodiments, a dsRNA of the present disclosure comprises a sense strand comprising a sense sequence shown in Table 1. For example, the sense strand comprises a sequence selected from SEQ ID NOs: 4, 7, 19, 90, 104, 107, 108, 110, 111, 168, 169, 172, 200, 221, 223, 279, and 298 or a sequence having at least 15, 16, 17, or 18 contiguous nucleotides derived from said selected sequence.

[0077] In some embodiments, a dsRNA of the present disclosure comprises an antisense strand comprising an antisense sequence shown in Table 1. In some embodiments, the antisense strand comprises a sequence selected from SEQ ID NOs: 303, 306, 318, 389, 403, 406, 407, 409, 410, 467, 468, 471, 499, 520, 522, 578, and 597 or a sequence having at least 15, 16, 17, or 18 contiguous nucleotides derived from said selected sequence. In a particular embodiment, the dsRNA comprises an antisense sequence that is at least 90% identical to a nucleotide sequence selected from the group consisting of SEQ ID NOs: 303, 306, 318, 389, 403, 406, 407, 409, 410, 467, 468, 471, 499, 520, 522, 578, and 597.

[0078] In a particular embodiment, the sense sequence and the antisense sequence are complementary, wherein:
[0079] a) the sense sequence comprises a nucleotide sequence selected from the group consisting of SEQ ID NOs: 4, 7, 19, 90, 104, 107, 108, 110, 111, 168, 169, 172, 200, 221, 223, 279, and 298; or
[0080] b) the antisense sequence comprises a nucleotide sequence selected from the group consisting of SEQ ID NOs: 303, 306, 318, 389, 403, 406, 407, 409, 410, 467, 468, 471, 499, 520, 522, 578, and 597.

[0081] In some embodiments, a dsRNA of the present disclosure comprises a sense strand comprising a sense sequence shown in Table 1 and an antisense strand comprising an antisense sequence shown in Table 1. In some embodiments, the sense and antisense strands respectively comprise the sequences of:
[0082] SEQ ID NOs: 4 and 303;
[0083] SEQ ID NOs: 7 and 306;
[0084] SEQ ID NOs: 19 and 318;
[0085] SEQ ID NOs: 90 and 389;
[0086] SEQ ID NOs: 104 and 403;
[0087] SEQ ID NOs: 107 and 406;
[0088] SEQ ID NOs: 108 and 407;
[0089] SEQ ID NOs: 110 and 409;
[0090] SEQ ID NOs: 111 and 410;
[0091] SEQ ID NOs: 168 and 467;
[0092] SEQ ID NOs: 169 and 468;
[0093] SEQ ID NOs: 172 and 471;
[0094] SEQ ID NOs: 200 and 499;
[0095] SEQ ID NOs: 221 and 520;
[0096] SEQ ID NOs: 223 and 522;
[0097] SEQ ID NOs: 279 and 578; or
[0098] SEQ ID NOs: 298 and 597.

[0099] In certain embodiments, the sense and antisense strands respectively comprise the sequences of:
[0100] SEQ ID NOs: 110 and 409;
[0101] SEQ ID NOs: 172 and 471; or
[0102] SEQ ID NOs: 223 and 522.

[0103] In some embodiments, the antisense sequence is fully complementary to a sequence selected from SEQ ID NOs: 110, 172, and 223. In some embodiments, the antisense sequence is substantially complementary to a sequence selected from SEQ ID NOs: 110, 172, and 223, wherein the antisense sequence comprises at least one mismatch (e.g., one, two, three, or four mismatches) to the selected sequence.

[0104] In some embodiments, the antisense sequence of the LPA mRNA-targeting dsRNA comprises one or more mismatches to the target sequence (for example, due to allelic differences among individuals in a general population). For example, the antisense sequence comprises one or more mismatches (e.g., one, two, three, or four mismatches) to the target sequence. In some embodiments, the one or more mismatches are not located in the center of the region of complementarity. In some embodiments, the one or more mismatches are located within five, four, three, two, or one nucleotide of the 5′ and/or 3′ ends of the region of complementarity. For example, for a dsRNA containing a 19 nucleotide antisense sequence, in some embodiments the antisense sequence may not contain any mismatch within the central 9 nucleotides of the region of complementarity between it and its target sequence in the LPA mRNA.

[0105] Table 1 below lists the sense and antisense sequences of exemplary siRNA constructs (CNST). The start (ST) and end (ED) nucleotide positions in NM_005577.2 (SEQ ID NO: 1632) are indicated. “SEQ” denotes SEQ ID NOs.

TABLE 1
Sequences of LPA siRNA Constructs

| CNS | | | Sense Sequence | | Antisense Sequence | |
|---|---|---|---|---|---|---|
| T# | ST | ED | (5′-3′) | SEQ | (5′-3′) | SEQ |
| 0001 | 5 | 23 | ACCUUUGGGGCUGGCUUUC | 1 | GAAAGCCAGCCCCAAAGGU | 300 |
| 0002 | 185 | 203 | GCCAUGUGGUCCAGGAUUG | 2 | CAAUCCUGGACCACAUGGC | 301 |
| 0003 | 219 | 237 | ACAGAGUUAUCGAGGCACG | 3 | CGUGCCUCGAUAACUCUGU | 302 |
| 0004 | 220 | 238 | CAGAGUUAUCGAGGCACGU | 4 | ACGUGCCUCGAUAACUCUG | 303 |
| 0005 | 221 | 239 | AGAGUUAUCGAGGCACGUA | 5 | UACGUGCCUCGAUAACUCU | 304 |
| 0006 | 222 | 240 | GAGUUAUCGAGGCACGUAC | 6 | GUACGUGCCUCGAUAACUC | 305 |
| 0007 | 223 | 241 | AGUUAUCGAGGCACGUACU | 7 | AGUACGUGCCUCGAUAACU | 306 |
| 0008 | 238 | 256 | UACUCCACCACUGUCACAG | 8 | CUGUGACAGUGGUGGAGUA | 307 |
| 0009 | 240 | 258 | CUCCACCACUGUCACAGGA | 9 | UCCUGUGACAGUGGUGGAG | 308 |
| 0010 | 259 | 277 | AGGACCUGCCAAGCUUGGU | 10 | ACCAAGCUUGGCAGGUCCU | 309 |
| 0011 | 261 | 279 | GACCUGCCAAGCUUGGUCA | 11 | UGACCAAGCUUGGCAGGUC | 310 |
| 0012 | 262 | 280 | ACCUGCCAAGCUUGGUCAU | 12 | AUGACCAAGCUUGGCAGGU | 311 |
| 0013 | 263 | 281 | CCUGCCAAGCUUGGUCAUC | 13 | GAUGACCAAGCUUGGCAGG | 312 |
| 0014 | 266 | 284 | GCCAAGCUUGGUCAUCUAU | 14 | AUAGAUGACCAAGCUUGGC | 313 |
| 0015 | 267 | 285 | CCAAGCUUGGUCAUCUAUG | 15 | CAUAGAUGACCAAGCUUGG | 314 |
| 0016 | 298 | 316 | CAUAAUAGGACCACAGAAA | 16 | UUUCUGUGGUCCUAUUAUG | 315 |
| 0017 | 300 | 318 | UAAUAGGACCACAGAAAAC | 17 | GUUUUCUGUGGUCCUAUUA | 316 |
| 0018 | 301 | 319 | AAUAGGACCACAGAAAACU | 18 | AGUUUUCUGUGGUCCUAUU | 317 |
| 0019 | 302 | 320 | AUAGGACCACAGAAAACUA | 19 | UAGUUUUCUGUGGUCCUAU | 318 |
| 0020 | 303 | 321 | UAGGACCACAGAAAACUAC | 20 | GUAGUUUUCUGUGGUCCUA | 319 |
| 0021 | 324 | 342 | AAAUGCUGGCUUGAUCAUG | 21 | CAUGAUCAAGCCAGCAUUU | 320 |
| 0022 | 330 | 348 | UGGCUUGAUCAUGAACUAC | 22 | GUAGUUCAUGAUCAAGCCA | 321 |
| 0023 | 331 | 349 | GGCUUGAUCAUGAACUACU | 23 | AGUAGUUCAUGAUCAAGCC | 322 |
| 0024 | 372 | 390 | AGCUCCUUAUUGUUAUACG | 24 | CGUAUAACAAUAAGGAGCU | 323 |
| 0025 | 373 | 391 | GCUCCUUAUUGUUAUACGA | 25 | UCGUAUAACAAUAAGGAGC | 324 |
| 0026 | 413 | 431 | AGUACUGCAACCUGACGCA | 26 | UGCGUCAGGUUGCAGUACU | 325 |
| 0027 | 414 | 432 | GUACUGCAACCUGACGCAA | 27 | UUGCGUCAGGUUGCAGUAC | 326 |
| 0028 | 415 | 433 | UACUGCAACCUGACGCAAU | 28 | AUUGCGUCAGGUUGCAGUA | 327 |
| 0029 | 418 | 436 | UGCAACCUGACGCAAUGCU | 29 | AGCAUUGCGUCAGGUUGCA | 328 |
| 0030 | 419 | 437 | GCAACCUGACGCAAUGCUC | 30 | GAGCAUUGCGUCAGGUUGC | 329 |
| 0031 | 420 | 438 | CAACCUGACGCAAUGCUCA | 31 | UGAGCAUUGCGUCAGGUUG | 330 |
| 0032 | 421 | 439 | AACCUGACGCAAUGCUCAG | 32 | CUGAGCAUUGCGUCAGGUU | 331 |
| 0033 | 422 | 440 | ACCUGACGCAAUGCUCAGA | 33 | UCUGAGCAUUGCGUCAGGU | 332 |
| 0034 | 423 | 441 | CCUGACGCAAUGCUCAGAC | 34 | GUCUGAGCAUUGCGUCAGG | 333 |
| 0035 | 424 | 442 | CUGACGCAAUGCUCAGACG | 35 | CGUCUGAGCAUUGCGUCAG | 334 |
| 0036 | 425 | 443 | UGACGCAAUGCUCAGACGC | 36 | GCGUCUGAGCAUUGCGUCA | 335 |
| 0037 | 465 | 483 | UCCGACUGUUACCCCGGUU | 37 | AACCGGGGUAACAGUCGGA | 336 |
| 0038 | 469 | 487 | ACUGUUACCCCGGUUCCAA | 38 | UUGGAACCGGGGUAACAGU | 337 |
| 0039 | 470 | 488 | CUGUUACCCCGGUUCCAAG | 39 | CUUGGAACCGGGGUAACAG | 338 |
| 0040 | 471 | 489 | UGUUACCCCGGUUCCAAGC | 40 | GCUUGGAACCGGGGUAACA | 339 |
| 0041 | 473 | 491 | UUACCCCGGUUCCAAGCCU | 41 | AGGCUUGGAACCGGGGUAA | 340 |
| 0042 | 474 | 492 | UACCCCGGUUCCAAGCCUA | 42 | UAGGCUUGGAACCGGGGUA | 341 |
| 0043 | 480 | 498 | GGUUCCAAGCCUAGAGGCU | 43 | AGCCUCUAGGCUUGGAACC | 342 |
| 0044 | 481 | 499 | GUUCCAAGCCUAGAGGCUC | 44 | GAGCCUCUAGGCUUGGAAC | 343 |
| 0045 | 489 | 507 | CCUAGAGGCUCCUUCCGAA | 45 | UUCGGAAGGAGCCUCUAGG | 344 |
| 0046 | 490 | 508 | CUAGAGGCUCCUUCCGAAC | 46 | GUUCGGAAGGAGCCUCUAG | 345 |
| 0047 | 495 | 513 | GGCUCCUUCCGAACAAGCA | 47 | UGCUUGUUCGGAAGGAGCC | 346 |
| 0048 | 499 | 517 | CCUUCCGAACAAGCACCGA | 48 | UCGGUGCUUGUUCGGAAGG | 347 |
| 0049 | 500 | 518 | CUUCCGAACAAGCACCGAC | 49 | GUCGGUGCUUGUUCGGAAG | 348 |
| 0050 | 501 | 519 | UUCCGAACAAGCACCGACU | 50 | AGUCGGUGCUUGUUCGGAA | 349 |
| 0051 | 502 | 520 | UCCGAACAAGCACCGACUG | 51 | CAGUCGGUGCUUGUUCGGA | 350 |
| 0052 | 503 | 521 | CCGAACAAGCACCGACUGA | 52 | UCAGUCGGUGCUUGUUCGG | 351 |
| 0053 | 505 | 523 | GAACAAGCACCGACUGAGC | 53 | GCUCAGUCGGUGCUUGUUC | 352 |
| 0054 | 506 | 524 | AACAAGCACCGACUGAGCA | 54 | UGCUCAGUCGGUGCUUGUU | 353 |
| 0055 | 507 | 525 | ACAAGCACCGACUGAGCAA | 55 | UUGCUCAGUCGGUGCUUGU | 354 |
| 0056 | 508 | 526 | CAAGCACCGACUGAGCAAA | 56 | UUUGCUCAGUCGGUGCUUG | 355 |
| 0057 | 509 | 527 | AAGCACCGACUGAGCAAAG | 57 | CUUUGCUCAGUCGGUGCUU | 356 |
| 0058 | 510 | 528 | AGCACCGACUGAGCAAAGG | 58 | CCUUUGCUCAGUCGGUGCU | 357 |
| 0059 | 552 | 570 | UGGUAAUGGACAGAGUUAU | 59 | AUAACUCUGUCCAUUACCA | 358 |
| 0060 | 554 | 572 | GUAAUGGACAGAGUUAUCG | 60 | CGAUAACUCUGUCCAUUAC | 359 |
| 0061 | 555 | 573 | UAAUGGACAGAGUUAUCGA | 61 | UCGAUAACUCUGUCCAUUA | 360 |
| 0062 | 563 | 581 | AGAGUUAUCGAGGCACAUA | 62 | UAUGUGCCUCGAUAACUCU | 361 |
| 0063 | 564 | 582 | GAGUUAUCGAGGCACAUAC | 63 | GUAUGUGCCUCGAUAACUC | 362 |
| 0064 | 565 | 583 | AGUUAUCGAGGCACAUACU | 64 | AGUAUGUGCCUCGAUAACU | 363 |
| 0065 | 566 | 584 | GUUAUCGAGGCACAUACUC | 65 | GAGUAUGUGCCUCGAUAAC | 364 |
| 0066 | 567 | 585 | UUAUCGAGGCACAUACUCC | 66 | GGAGUAUGUGCCUCGAUAA | 365 |
| 0067 | 574 | 592 | GGCACAUACUCCACCACUG | 67 | CAGUGGUGGAGUAUGUGCC | 366 |
| 0068 | 578 | 596 | CAUACUCCACCACUGUCAC | 68 | GUGACAGUGGUGGAGUAUG | 367 |
| 0069 | 598 | 616 | GGAAGAACCUGCCAAGCUU | 69 | AAGCUUGGCAGGUUCUUCC | 368 |
| 0070 | 624 | 642 | UAUGACACCACACUCGCAU | 70 | AUGCGAGUGUGGUGUCAUA | 369 |
| 0071 | 625 | 643 | AUGACACCACACUCGCAUA | 71 | UAUGCGAGUGUGGUGUCAU | 370 |
| 0072 | 626 | 644 | UGACACCACACUCGCAUAG | 72 | CUAUGCGAGUGUGGUGUCA | 371 |
| 0073 | 627 | 645 | GACACCACACUCGCAUAGU | 73 | ACUAUGCGAGUGUGGUGUC | 372 |
| 0074 | 628 | 646 | ACACCACACUCGCAUAGUC | 74 | GACUAUGCGAGUGUGGUGU | 373 |
| 0075 | 630 | 648 | ACCACACUCGCAUAGUCGG | 75 | CCGACUAUGCGAGUGUGGU | 374 |
| 0076 | 631 | 649 | CCACACUCGCAUAGUCGGA | 76 | UCCGACUAUGCGAGUGUGG | 375 |
| 0077 | 632 | 650 | CACACUCGCAUAGUCGGAC | 77 | GUCCGACUAUGCGAGUGUG | 376 |
| 0078 | 633 | 651 | ACACUCGCAUAGUCGGACC | 78 | GGUCCGACUAUGCGAGUGU | 377 |
| 0079 | 640 | 658 | CAUAGUCGGACCCCAGAAU | 79 | AUUCUGGGGUCCGACUAUG | 378 |
| 0080 | 641 | 659 | AUAGUCGGACCCCAGAAUA | 80 | UAUUCUGGGGUCCGACUAU | 379 |
| 0081 | 642 | 660 | UAGUCGGACCCCAGAAUAC | 81 | GUAUUCUGGGGUCCGACUA | 380 |
| 0082 | 643 | 661 | AGUCGGACCCCAGAAUACU | 82 | AGUAUUCUGGGGUCCGACU | 381 |
| 0083 | 644 | 662 | GUCGGACCCCAGAAUACUA | 83 | UAGUAUUCUGGGGUCCGAC | 382 |
| 0084 | 645 | 663 | UCGGACCCCAGAAUACUAC | 84 | GUAGUAUUCUGGGGUCCGA | 383 |
| 0085 | 646 | 664 | CGGACCCCAGAAUACUACC | 85 | GGUAGUAUUCUGGGGUCCG | 384 |
| 0086 | 1191 | 1209 | ACAAGCACCGACUGAGCAG | 86 | CUGCUCAGUCGGUGCUUGU | 385 |
| 0087 | 1193 | 1211 | AAGCACCGACUGAGCAGAG | 87 | CUCUGCUCAGUCGGUGCUU | 386 |
| 0088 | 1234 | 1252 | CACGGUAAUGGACAGAGUU | 88 | AACUCUGUCCAUUACCGUG | 387 |
| 0089 | 1235 | 1253 | ACGGUAAUGGACAGAGUUA | 89 | UAACUCUGUCCAUUACCGU | 388 |
| 0090 | 1236 | 1254 | CGGUAAUGGACAGAGUUAU | 90 | AUAACUCUGUCCAUUACCG | 389 |
| 0091 | 2867 | 2885 | UUACCCCGAUUCCAAGCCU | 91 | AGGCUUGGAAUCGGGGUAA | 390 |
| 0092 | 2868 | 2886 | UACCCCGAUUCCAAGCCUA | 92 | UAGGCUUGGAAUCGGGGUA | 391 |
| 0093 | 2869 | 2887 | ACCCCGAUUCCAAGCCUAG | 93 | CUAGGCUUGGAAUCGGGGU | 392 |
| 0094 | 2870 | 2888 | CCCCGAUUCCAAGCCUAGA | 94 | UCUAGGCUUGGAAUCGGGG | 393 |
| 0095 | 2871 | 2889 | CCCGAUUCCAAGCCUAGAG | 95 | CUCUAGGCUUGGAAUCGGG | 394 |
| 0096 | 2872 | 2890 | CCGAUUCCAAGCCUAGAGG | 96 | CCUCUAGGCUUGGAAUCGG | 395 |
| 0097 | 2873 | 2891 | CGAUUCCAAGCCUAGAGGC | 97 | GCCUCUAGGCUUGGAAUCG | 396 |
| 0098 | 2874 | 2892 | GAUUCCAAGCCUAGAGGCU | 98 | AGCCUCUAGGCUUGGAAUC | 397 |
| 0099 | 2907 | 2925 | ACCAACUGAGCAAAGGCCU | 99 | AGGCCUUUGCUCAGUUGGU | 398 |
| 0100 | 2941 | 2959 | UACCACGGAAAUGGACAGA | 100 | UCUGUCCAUUUCCGUGGUA | 399 |
| 0101 | 2942 | 2960 | ACCACGGAAAUGGACAGAG | 101 | CUCUGUCCAUUUCCGUGGU | 400 |
| 0102 | 2944 | 2962 | CACGGAAAUGGACAGAGUU | 102 | AACUCUGUCCAUUUCCGUG | 401 |
| 0103 | 2945 | 2963 | ACGGAAAUGGACAGAGUUA | 103 | UAACUCUGUCCAUUUCCGU | 402 |
| 0104 | 2946 | 2964 | CGGAAAUGGACAGAGUUAU | 104 | AUAACUCUGUCCAUUUCCG | 403 |
| 0105 | 2950 | 2968 | AAUGGACAGAGUUAUCAAG | 105 | CUUGAUAACUCUGUCCAUU | 404 |
| 0106 | 2951 | 2969 | AUGGACAGAGUUAUCAAGG | 106 | CCUUGAUAACUCUGUCCAU | 405 |
| 0107 | 2953 | 2971 | GGACAGAGUUAUCAAGGCA | 107 | UGCCUUGAUAACUCUGUCC | 406 |
| 0108 | 2954 | 2972 | GACAGAGUUAUCAAGGCAC | 108 | GUGCCUUGAUAACUCUGUC | 407 |
| 0109 | 2955 | 2973 | ACAGAGUUAUCAAGGCACA | 109 | UGUGCCUUGAUAACUCUGU | 408 |
| 0110 | 2958 | 2976 | GAGUUAUCAAGGCACAUAC | 110 | GUAUGUGCCUUGAUAACUC | 409 |
| 0111 | 2959 | 2977 | AGUUAUCAAGGCACAUACU | 111 | AGUAUGUGCCUUGAUAACU | 410 |
| 0112 | 2960 | 2978 | GUUAUCAAGGCACAUACUU | 112 | AAGUAUGUGCCUUGAUAAC | 411 |
| 0113 | 3060 | 3078 | AAAUGCUGGCUUGAUCAAG | 113 | CUUGAUCAAGCCAGCAUUU | 412 |
| 0114 | 3068 | 3086 | GCUUGAUCAAGAACUACUG | 114 | CAGUAGUUCUUGAUCAAGC | 413 |
| 0115 | 3109 | 3127 | GCCCCUUGGUGUUAUACAA | 115 | UUGUAUAACACCAAGGGGC | 414 |
| 0116 | 3111 | 3129 | CCCUUGGUGUUAUACAACA | 116 | UGUUGUAUAACACCAAGGG | 415 |
| 0117 | 3114 | 3132 | UUGGUGUUAUACAACAGAU | 117 | AUCUGUUGUAUAACACCAA | 416 |
| 0118 | 3117 | 3135 | GUGUUAUACAACAGAUCCC | 118 | GGGAUCUGUUGUAUAACAC | 417 |
| 0119 | 3121 | 3139 | UAUACAACAGAUCCCAGUG | 119 | CACUGGGAUCUGUUGUAUA | 418 |
| 0120 | 3496 | 3514 | UGCAACCUGACACAAUGCC | 120 | GGCAUUGUGUCAGGUUGCA | 419 |
| 0121 | 3497 | 3515 | GCAACCUGACACAAUGCCU | 121 | AGGCAUUGUGUCAGGUUGC | 420 |
| 0122 | 3540 | 3558 | AACUCUCACGGUGGUCCCA | 122 | UGGGACCACCGUGAGAGUU | 421 |
| 0123 | 3543 | 3561 | UCUCACGGUGGUCCCAGAU | 123 | AUCUGGGACCACCGUGAGA | 422 |
| 0124 | 3547 | 3565 | ACGGUGGUCCCAGAUCCAA | 124 | UUGGAUCUGGGACCACCGU | 423 |
| 0125 | 3551 | 3569 | UGGUCCCAGAUCCAAGCAC | 125 | GUGCUUGGAUCUGGGACCA | 424 |
| 0126 | 3554 | 3572 | UCCCAGAUCCAAGCACAGA | 126 | UCUGUGCUUGGAUCUGGGA | 425 |
| 0127 | 3558 | 3576 | AGAUCCAAGCACAGAGGCU | 127 | AGCCUCUGUGCUUGGAUCU | 426 |
| 0128 | 3559 | 3577 | GAUCCAAGCACAGAGGCUU | 128 | AAGCCUCUGUGCUUGGAUC | 427 |
| 0129 | 3560 | 3578 | AUCCAAGCACAGAGGCUUC | 129 | GAAGCCUCUGUGCUUGGAU | 428 |
| 0130 | 3662 | 3680 | CUACCACUGUCACAGGAAG | 130 | CUUCCUGUGACAGUGGUAG | 429 |
| 0131 | 4155 | 4173 | CUGCAACCUGACGCAAUGU | 131 | ACAUUGCGUCAGGUUGCAG | 430 |
| 0132 | 4156 | 4174 | UGCAACCUGACGCAAUGUC | 132 | GACAUUGCGUCAGGUUGCA | 431 |
| 0133 | 4157 | 4175 | GCAACCUGACGCAAUGUCC | 133 | GGACAUUGCGUCAGGUUGC | 432 |
| 0134 | 4256 | 4274 | CUGAAAACAGCACUGGGGU | 134 | ACCCCAGUGCUGUUUUCAG | 433 |
| 0135 | 4300 | 4318 | CAGAGUUAUCGAGGCACAC | 135 | GUGUGCCUCGAUAACUCUG | 434 |
| 0136 | 4301 | 4319 | AGAGUUAUCGAGGCACACU | 136 | AGUGUGCCUCGAUAACUCU | 435 |
| 0137 | 4302 | 4320 | GAGUUAUCGAGGCACACUC | 137 | GAGUGUGCCUCGAUAACUC | 436 |
| 0138 | 4303 | 4321 | AGUUAUCGAGGCACACUCU | 138 | AGAGUGUGCCUCGAUAACU | 437 |
| 0139 | 4304 | 4322 | GUUAUCGAGGCACACUCUC | 139 | GAGAGUGUGCCUCGAUAAC | 438 |
| 0140 | 4305 | 4323 | UUAUCGAGGCACACUCUCC | 140 | GGAGAGUGUGCCUCGAUAA | 439 |
| 0141 | 4306 | 4324 | UAUCGAGGCACACUCUCCA | 141 | UGGAGAGUGUGCCUCGAUA | 440 |
| 0142 | 4307 | 4325 | AUCGAGGCACACUCUCCAC | 142 | GUGGAGAGUGUGCCUCGAU | 441 |
| 0143 | 4312 | 4330 | GGCACACUCUCCACCACUA | 143 | UAGUGGUGGAGAGUGUGCC | 442 |
| 0144 | 4319 | 4337 | UCUCCACCACUAUCACAGG | 144 | CCUGUGAUAGUGGUGGAGA | 443 |
| 0145 | 4359 | 4377 | GUCUAUGACACCACAUUGG | 145 | CCAAUGUGGUGUCAUAGAC | 444 |
| 0146 | 4362 | 4380 | UAUGACACCACAUUGGCAU | 146 | AUGCCAAUGUGGUGUCAUA | 445 |
| 0147 | 4366 | 4384 | ACACCACAUUGGCAUCGGA | 147 | UCCGAUGCCAAUGUGGUGU | 446 |
| 0148 | 4367 | 4385 | CACCACAUUGGCAUCGGAG | 148 | CUCCGAUGCCAAUGUGGUG | 447 |
| 0149 | 4368 | 4386 | ACCACAUUGGCAUCGGAGG | 149 | CCUCCGAUGCCAAUGUGGU | 448 |
| 0150 | 4369 | 4387 | CCACAUUGGCAUCGGAGGA | 150 | UCCUCCGAUGCCAAUGUGG | 449 |
| 0151 | 4370 | 4388 | CACAUUGGCAUCGGAGGAU | 151 | AUCCUCCGAUGCCAAUGUG | 450 |
| 0152 | 4371 | 4389 | ACAUUGGCAUCGGAGGAUC | 152 | GAUCCUCCGAUGCCAAUGU | 451 |
| 0153 | 4372 | 4390 | CAUUGGCAUCGGAGGAUCC | 153 | GGAUCCUCCGAUGCCAAUG | 452 |
| 0154 | 4373 | 4391 | AUUGGCAUCGGAGGAUCCC | 154 | GGGAUCCUCCGAUGCCAAU | 453 |
| 0155 | 4376 | 4394 | GGCAUCGGAGGAUCCCAUU | 155 | AAUGGGAUCCUCCGAUGCC | 454 |
| 0156 | 4497 | 4515 | CUGCAACCUGACACGAUGU | 156 | ACAUCGUGUCAGGUUGCAG | 455 |
| 0157 | 4498 | 4516 | UGCAACCUGACACGAUGUC | 157 | GACAUCGUGUCAGGUUGCA | 456 |
| 0158 | 4499 | 4517 | GCAACCUGACACGAUGUCC | 158 | GGACAUCGUGUCAGGUUGC | 457 |
| 0159 | 4500 | 4518 | CAACCUGACACGAUGUCCA | 159 | UGGACAUCGUGUCAGGUUG | 458 |
| 0160 | 4501 | 4519 | AACCUGACACGAUGUCCAG | 160 | CUGGACAUCGUGUCAGGUU | 459 |
| 0161 | 4503 | 4521 | CCUGACACGAUGUCCAGUG | 161 | CACUGGACAUCGUGUCAGG | 460 |
| 0162 | 4504 | 4522 | CUGACACGAUGUCCAGUGA | 162 | UCACUGGACAUCGUGUCAG | 461 |
| 0163 | 4505 | 4523 | UGACACGAUGUCCAGUGAC | 163 | GUCACUGGACAUCGUGUCA | 462 |
| 0164 | 4506 | 4524 | GACACGAUGUCCAGUGACA | 164 | UGUCACUGGACAUCGUGUC | 463 |
| 0165 | 4507 | 4525 | ACACGAUGUCCAGUGACAG | 165 | CUGUCACUGGACAUCGUGU | 464 |
| 0166 | 4510 | 4528 | CGAUGUCCAGUGACAGAAU | 166 | AUUCUGUCACUGGACAUCG | 465 |
| 0167 | 4634 | 4652 | GUGAUGGACGGAGUUAUCG | 167 | CGAUAACUCCGUCCAUCAC | 466 |
| 0168 | 4635 | 4653 | UGAUGGACGGAGUUAUCGA | 168 | UCGAUAACUCCGUCCAUCA | 467 |
| 0169 | 4636 | 4654 | GAUGGACGGAGUUAUCGAG | 169 | CUCGAUAACUCCGUCCAUC | 468 |
| 0170 | 4637 | 4655 | AUGGACGGAGUUAUCGAGG | 170 | CCUCGAUAACUCCGUCCAU | 469 |
| 0171 | 4638 | 4656 | UGGACGGAGUUAUCGAGGC | 171 | GCCUCGAUAACUCCGUCCA | 470 |
| 0172 | 4639 | 4657 | GGACGGAGUUAUCGAGGCA | 172 | UGCCUCGAUAACUCCGUCC | 471 |
| 0173 | 4644 | 4662 | GAGUUAUCGAGGCAUAUCC | 173 | GGAUAUGCCUCGAUAACUC | 472 |
| 0174 | 4645 | 4663 | AGUUAUCGAGGCAUAUCCU | 174 | AGGAUAUGCCUCGAUAACU | 473 |
| 0175 | 4646 | 4664 | GUUAUCGAGGCAUAUCCUC | 175 | GAGGAUAUGCCUCGAUAAC | 474 |
| 0176 | 4647 | 4665 | UUAUCGAGGCAUAUCCUCC | 176 | GGAGGAUAUGCCUCGAUAA | 475 |
| 0177 | 4678 | 4696 | GGAAGGACCUGUCAAUCUU | 177 | AAGAUUGACAGGUCCUUCC | 476 |
| 0178 | 4680 | 4698 | AAGGACCUGUCAAUCUUGG | 178 | CCAAGAUUGACAGGUCCUU | 477 |
| 0179 | 4681 | 4699 | AGGACCUGUCAAUCUUGGU | 179 | ACCAAGAUUGACAGGUCCU | 478 |
| 0180 | 4682 | 4700 | GGACCUGUCAAUCUUGGUC | 180 | GACCAAGAUUGACAGGUCC | 479 |
| 0181 | 4753 | 4771 | GGCCUGACCGAGAACUACU | 181 | AGUAGUUCUCGGUCAGGCC | 480 |
| 0182 | 4755 | 4773 | CCUGACCGAGAACUACUGC | 182 | GCAGUAGUUCUCGGUCAGG | 481 |
| 0183 | 4756 | 4774 | CUGACCGAGAACUACUGCA | 183 | UGCAGUAGUUCUCGGUCAG | 482 |
| 0184 | 4757 | 4775 | UGACCGAGAACUACUGCAG | 184 | CUGCAGUAGUUCUCGGUCA | 483 |
| 0185 | 4775 | 4793 | GGAAUCCAGAUUCUGGGAA | 185 | UUCCCAGAAUCUGGAUUCC | 484 |
| 0186 | 4777 | 4795 | AAUCCAGAUUCUGGGAAAC | 186 | GUUUCCCAGAAUCUGGAUU | 485 |
| 0187 | 4786 | 4804 | UCUGGGAAACAACCCUGGU | 187 | ACCAGGGUUGUUUCCCAGA | 486 |
| 0188 | 4787 | 4805 | CUGGGAAACAACCCUGGUG | 188 | CACCAGGGUUGUUUCCCAG | 487 |
| 0189 | 4789 | 4807 | GGGAAACAACCCUGGUGUU | 189 | AACACCAGGGUUGUUUCCC | 488 |
| 0190 | 4791 | 4809 | GAAACAACCCUGGUGUUAC | 190 | GUAACACCAGGGUUGUUUC | 489 |
| 0191 | 4792 | 4810 | AAACAACCCUGGUGUUACA | 191 | UGUAACACCAGGGUUGUUU | 490 |
| 0192 | 4793 | 4811 | AACAACCCUGGUGUUACAC | 192 | GUGUAACACCAGGGUUGUU | 491 |
| 0193 | 4794 | 4812 | ACAACCCUGGUGUUACACA | 193 | UGUGUAACACCAGGGUUGU | 492 |
| 0194 | 4795 | 4813 | CAACCCUGGUGUUACACAA | 194 | UUGUGUAACACCAGGGUUG | 493 |
| 0195 | 4796 | 4814 | AACCCUGGUGUUACACAAC | 195 | GUUGUGUAACACCAGGGUU | 494 |
| 0196 | 4820 | 4838 | CGUGUGUGAGGUGGGAGUA | 196 | UACUCCCACCUCACACACG | 495 |
| 0197 | 4834 | 4852 | GAGUACUGCAAUCUGACAC | 197 | GUGUCAGAUUGCAGUACUC | 496 |
| 0198 | 4840 | 4858 | UGCAAUCUGACACAAUGCU | 198 | AGCAUUGUGUCAGAUUGCA | 497 |
| 0199 | 4841 | 4859 | GCAAUCUGACACAAUGCUC | 199 | GAGCAUUGUGUCAGAUUGC | 498 |
| 0200 | 4842 | 4860 | CAAUCUGACACAAUGCUCA | 200 | UGAGCAUUGUGUCAGAUUG | 499 |
| 0201 | 4886 | 4904 | CUCCCACUGUUGUUCCAGU | 201 | ACUGGAACAACAGUGGGAG | 500 |
| 0202 | 4887 | 4905 | UCCCACUGUUGUUCCAGUU | 202 | AACUGGAACAACAGUGGGA | 501 |
| 0203 | 4889 | 4907 | CCACUGUUGUUCCAGUUCC | 203 | GGAACUGGAACAACAGUGG | 502 |
| 0204 | 4890 | 4908 | CACUGUUGUUCCAGUUCCA | 204 | UGGAACUGGAACAACAGUG | 503 |
| 0205 | 4894 | 4912 | GUUGUUCCAGUUCCAAGCA | 205 | UGCUUGGAACUGGAACAAC | 504 |
| 0206 | 4896 | 4914 | UGUUCCAGUUCCAAGCAUG | 206 | CAUGCUUGGAACUGGAACA | 505 |
| 0207 | 4897 | 4915 | GUUCCAGUUCCAAGCAUGG | 207 | CCAUGCUUGGAACUGGAAC | 506 |
| 0208 | 4911 | 4929 | CAUGGAGGCUCAUUCUGAA | 208 | UUCAGAAUGAGCCUCCAUG | 507 |
| 0209 | 4912 | 4930 | AUGGAGGCUCAUUCUGAAG | 209 | CUUCAGAAUGAGCCUCCAU | 508 |
| 0210 | 4914 | 4932 | GGAGGCUCAUUCUGAAGCA | 210 | UGCUUCAGAAUGAGCCUCC | 509 |
| 0211 | 4921 | 4939 | CAUUCUGAAGCAGCACCAA | 211 | UUGGUGCUGCUUCAGAAUG | 510 |
| 0212 | 4927 | 4945 | GAAGCAGCACCAACUGAGC | 212 | GCUCAGUUGGUGCUGCUUC | 511 |
| 0213 | 4930 | 4948 | GCAGCACCAACUGAGCAAA | 213 | UUUGCUCAGUUGGUGCUGC | 512 |
| 0214 | 4960 | 4978 | CGGCAGUGCUACCAUGGUA | 214 | UACCAUGGUAGCACUGCCG | 513 |
| 0215 | 4963 | 4981 | CAGUGCUACCAUGGUAAUG | 215 | CAUUACCAUGGUAGCACUG | 514 |
| 0216 | 4965 | 4983 | GUGCUACCAUGGUAAUGGC | 216 | GCCAUUACCAUGGUAGCAC | 515 |
| 0217 | 4972 | 4990 | CAUGGUAAUGGCCAGAGUU | 217 | AACUCUGGCCAUUACCAUG | 516 |
| 0218 | 4975 | 4993 | GGUAAUGGCCAGAGUUAUC | 218 | GAUAACUCUGGCCAUUACC | 517 |
| 0219 | 4976 | 4994 | GUAAUGGCCAGAGUUAUCG | 219 | CGAUAACUCUGGCCAUUAC | 518 |
| 0220 | 4977 | 4995 | UAAUGGCCAGAGUUAUCGA | 220 | UCGAUAACUCUGGCCAUUA | 519 |
| 0221 | 4980 | 4998 | UGGCCAGAGUUAUCGAGGC | 221 | GCCUCGAUAACUCUGGCCA | 520 |
| 0222 | 4981 | 4999 | GGCCAGAGUUAUCGAGGCA | 222 | UGCCUCGAUAACUCUGGCC | 521 |
| 0223 | 4982 | 5000 | GCCAGAGUUAUCGAGGCAC | 223 | GUGCCUCGAUAACUCUGGC | 522 |
| 0224 | 4983 | 5001 | CCAGAGUUAUCGAGGCACA | 224 | UGUGCCUCGAUAACUCUGG | 523 |
| 0225 | 4985 | 5003 | AGAGUUAUCGAGGCACAUU | 225 | AAUGUGCCUCGAUAACUCU | 524 |
| 0226 | 4986 | 5004 | GAGUUAUCGAGGCACAUUC | 226 | GAAUGUGCCUCGAUAACUC | 525 |
| 0227 | 4987 | 5005 | AGUUAUCGAGGCACAUUCU | 227 | AGAAUGUGCCUCGAUAACU | 526 |
| 0228 | 4997 | 5015 | GCACAUUCUCCACCACUGU | 228 | ACAGUGGUGGAGAAUGUGC | 527 |
| 0229 | 5001 | 5019 | AUUCUCCACCACUGUCACA | 229 | UGUGACAGUGGUGGAGAAU | 528 |
| 0230 | 5016 | 5034 | CACAGGAAGGACAUGUCAA | 230 | UUGACAUGUCCUUCCUGUG | 529 |
| 0231 | 5021 | 5039 | GAAGGACAUGUCAAUCUUG | 231 | CAAGAUUGACAUGUCCUUC | 530 |
| 0232 | 5149 | 5167 | UUUACCAUGGACCCCAGCA | 232 | UGCUGGGGUCCAUGGUAAA | 531 |
| 0233 | 5150 | 5168 | UUACCAUGGACCCCAGCAU | 233 | AUGCUGGGGUCCAUGGUAA | 532 |
| 0234 | 5180 | 5198 | ACUGCAACCUGACGCGAUG | 234 | CAUCGCGUCAGGUUGCAGU | 533 |
| 0235 | 5186 | 5204 | ACCUGACGCGAUGCUCAGA | 235 | UCUGAGCAUCGCGUCAGGU | 534 |
| 0236 | 5189 | 5207 | UGACGCGAUGCUCAGACAC | 236 | GUGUCUGAGCAUCGCGUCA | 535 |
| 0237 | 5190 | 5208 | GACGCGAUGCUCAGACACA | 237 | UGUGUCUGAGCAUCGCGUC | 536 |
| 0238 | 5191 | 5209 | ACGCGAUGCUCAGACACAG | 238 | CUGUGUCUGAGCAUCGCGU | 537 |
| 0239 | 5192 | 5210 | CGCGAUGCUCAGACACAGA | 239 | UCUGUGUCUGAGCAUCGCG | 538 |
| 0240 | 5761 | 5779 | GAAGUGAACCUCGAAUCUC | 240 | GAGAUUCGAGGUUCACUUC | 539 |
| 0241 | 5922 | 5940 | CAGGACUGAAUGUUACAUC | 241 | GAUGUAACAUUCAGUCCUG | 540 |
| 0242 | 5956 | 5974 | ACCCAAGGUACCUUUGGGA | 242 | UCCCAAAGGUACCUUGGGU | 541 |
| 0243 | 5957 | 5975 | CCCAAGGUACCUUUGGGAC | 243 | GUCCCAAAGGUACCUUGGG | 542 |
| 0244 | 5964 | 5982 | UACCUUUGGGACUGGCCUU | 244 | AAGGCCAGUCCCAAAGGUA | 543 |
| 0245 | 5965 | 5983 | ACCUUUGGGACUGGCCUUC | 245 | GAAGGCCAGUCCCAAAGGU | 544 |
| 0246 | 6323 | 6341 | GACAGCAAUCAAACGAAGA | 246 | UCUUCGUUUGAUUGCUGUC | 545 |
| 0247 | 6324 | 6342 | ACAGCAAUCAAACGAAGAC | 247 | GUCUUCGUUUGAUUGCUGU | 546 |
| 0248 | 6325 | 6343 | CAGCAAUCAAACGAAGACA | 248 | UGUCUUCGUUUGAUUGCUG | 547 |
| 0249 | 6326 | 6344 | AGCAAUCAAACGAAGACAC | 249 | GUGUCUUCGUUUGAUUGCU | 548 |
| 0250 | 6327 | 6345 | GCAAUCAAACGAAGACACU | 250 | AGUGUCUUCGUUUGAUUGC | 549 |
| 0251 | 6328 | 6346 | CAAUCAAACGAAGACACUG | 251 | CAGUGUCUUCGUUUGAUUG | 550 |
| 0252 | 6330 | 6348 | AUCAAACGAAGACACUGUU | 252 | AACAGUGUCUUCGUUUGAU | 551 |
| 0253 | 6331 | 6349 | UCAAACGAAGACACUGUUC | 253 | GAACAGUGUCUUCGUUUGA | 552 |
| 0254 | 6332 | 6350 | CAAACGAAGACACUGUUCC | 254 | GGAACAGUGUCUUCGUUUG | 553 |
| 0255 | 6333 | 6351 | AAACGAAGACACUGUUCCC | 255 | GGGAACAGUGUCUUCGUUU | 554 |
| 0256 | 6334 | 6352 | AACGAAGACACUGUUCCCA | 256 | UGGGAACAGUGUCUUCGUU | 555 |
| 0257 | 6335 | 6353 | ACGAAGACACUGUUCCCAG | 257 | CUGGGAACAGUGUCUUCGU | 556 |
| 0258 | 6336 | 6354 | CGAAGACACUGUUCCCAGC | 258 | GCUGGGAACAGUGUCUUCG | 557 |
| 0259 | 6337 | 6355 | GAAGACACUGUUCCCAGCU | 259 | AGCUGGGAACAGUGUCUUC | 558 |
| 0260 | 6338 | 6356 | AAGACACUGUUCCCAGCUA | 260 | UAGCUGGGAACAGUGUCUU | 559 |
| 0261 | 6339 | 6357 | AGACACUGUUCCCAGCUAC | 261 | GUAGCUGGGAACAGUGUCU | 560 |
| 0262 | 6340 | 6358 | GACACUGUUCCCAGCUACC | 262 | GGUAGCUGGGAACAGUGUC | 561 |
| 0263 | 6341 | 6359 | ACACUGUUCCCAGCUACCA | 263 | UGGUAGCUGGGAACAGUGU | 562 |
| 0264 | 6350 | 6368 | CCAGCUACCAGCUAUGCCA | 264 | UGGCAUAGCUGGUAGCUGG | 563 |
| 0265 | 6351 | 6369 | CAGCUACCAGCUAUGCCAA | 265 | UUGGCAUAGCUGGUAGCUG | 564 |
| 0266 | 6352 | 6370 | AGCUACCAGCUAUGCCAAA | 266 | UUUGGCAUAGCUGGUAGCU | 565 |
| 0267 | 6353 | 6371 | GCUACCAGCUAUGCCAAAC | 267 | GUUUGGCAUAGCUGGUAGC | 566 |
| 0268 | 6354 | 6372 | CUACCAGCUAUGCCAAACC | 268 | GGUUUGGCAUAGCUGGUAG | 567 |
| 0269 | 6355 | 6373 | UACCAGCUAUGCCAAACCU | 269 | AGGUUUGGCAUAGCUGGUA | 568 |
| 0270 | 6376 | 6394 | GCAUUUUUGGUAUUUUUGU | 270 | ACAAAAAUACCAAAAAUGC | 569 |
| 0271 | 6377 | 6395 | CAUUUUUGGUAUUUUUGUG | 271 | CACAAAAAUACCAAAAAUG | 570 |
| 0272 | 6378 | 6396 | AUUUUUGGUAUUUUUGUGU | 272 | ACACAAAAAUACCAAAAAU | 571 |
| 0273 | 6379 | 6397 | UUUUUGGUAUUUUUGUGUA | 273 | UACACAAAAAUACCAAAAA | 572 |
| 0274 | 6380 | 6398 | UUUUGGUAUUUUUGUGUAU | 274 | AUACACAAAAAUACCAAAA | 573 |
| 0275 | 6381 | 6399 | UUUGGUAUUUUUGUGUAUA | 275 | UAUACACAAAAAUACCAAA | 574 |
| 0276 | 6382 | 6400 | UUGGUAUUUUUGUGUAUAA | 276 | UUAUACACAAAAAUACCAA | 575 |
| 0277 | 6383 | 6401 | UGGUAUUUUUGUGUAUAAG | 277 | CUUAUACACAAAAAUACCA | 576 |
| 0278 | 6384 | 6402 | GGUAUUUUUGUGUAUAAGC | 278 | GCUUAUACACAAAAAUACC | 577 |
| 0279 | 6385 | 6403 | GUAUUUUUGUGUAUAAGCU | 279 | AGCUUAUACACAAAAAUAC | 578 |
| 0280 | 6386 | 6404 | UAUUUUUGUGUAUAAGCUU | 280 | AAGCUUAUACACAAAAAUA | 579 |
| 0281 | 6387 | 6405 | AUUUUUGUGUAUAAGCUUU | 281 | AAAGCUUAUACACAAAAAU | 580 |
| 0282 | 6388 | 6406 | UUUUUGUGUAUAAGCUUUU | 282 | AAAAGCUUAUACACAAAAA | 581 |
| 0283 | 6455 | 6473 | UGUUAAAAAUAAACUCUGC | 283 | GCAGAGUUUAUUUUUAACA | 582 |
| 0284 | 6456 | 6474 | GUUAAAAAUAAACUCUGCA | 284 | UGCAGAGUUUAUUUUUAAC | 583 |
| 0285 | 6457 | 6475 | UUAAAAAUAAACUCUGCAC | 285 | GUGCAGAGUUUAUUUUUAA | 584 |
| 0286 | 6458 | 6476 | UAAAAAUAAACUCUGCACU | 286 | AGUGCAGAGUUUAUUUUUA | 585 |
| 0287 | 6459 | 6477 | AAAAAUAAACUCUGCACUU | 287 | AAGUGCAGAGUUUAUUUUU | 586 |
| 0288 | 6460 | 6478 | AAAAUAAACUCUGCACUUA | 288 | UAAGUGCAGAGUUUAUUUU | 587 |
| 0289 | 6461 | 6479 | AAAUAAACUCUGCACUUAU | 289 | AUAAGUGCAGAGUUUAUUU | 588 |
| 0290 | 6462 | 6480 | AAUAAACUCUGCACUUAUU | 290 | AAUAAGUGCAGAGUUUAUU | 589 |
| 0291 | 6463 | 6481 | AUAAACUCUGCACUUAUUU | 291 | AAAUAAGUGCAGAGUUUAU | 590 |
| 0292 | 6464 | 6482 | UAAACUCUGCACUUAUUUU | 292 | AAAAUAAGUGCAGAGUUUA | 591 |
| 0293 | 6465 | 6483 | AAACUCUGCACUUAUUUUG | 293 | CAAAAUAAGUGCAGAGUUU | 592 |
| 0294 | 6466 | 6484 | AACUCUGCACUUAUUUUGA | 294 | UCAAAAUAAGUGCAGAGUU | 593 |
| 0295 | 6467 | 6485 | ACUCUGCACUUAUUUUGAU | 295 | AUCAAAAUAAGUGCAGAGU | 594 |
| 0296 | 6468 | 6486 | CUCUGCACUUAUUUUGAUU | 296 | AAUCAAAAUAAGUGCAGAG | 595 |
| 0297 | 6469 | 6487 | UCUGCACUUAUUUUGAUUU | 297 | AAAUCAAAAUAAGUGCAGA | 596 |
| 0298 | 6470 | 6488 | CUGCACUUAUUUUGAUUUG | 298 | CAAAUCAAAAUAAGUGCAG | 597 |
| 0299 | 6471 | 6489 | UGCACUUAUUUUGAUUUGA | 299 | UCAAAUCAAAAUAAGUGCA | 598 |

[0106] I.4 Nucleotide Modifications

[0107] A dsRNA of the present disclosure may comprise one or more modifications, e.g., to enhance cellular uptake, affinity for the target sequence, inhibitory activity, and/or stability. Modifications may include any modification known in the art, including, for example, end modifications, base modifications, sugar modifications/replacements, and backbone modifications. End modifications may include, for example, 5′ end modifications (e.g., phosphorylation, conjugation, and inverted linkages) and 3′ end modifications (e.g., conjugation, DNA nucleotides, and inverted linkages). Base modifications may include, e.g., replacement with stabilizing bases, destabilizing bases or bases that base-pair with an expanded repertoire of partners, removal of bases (abasic modifications of nucleotides), or conjugated bases. Sugar modifications or replacements may include, e.g., modifications at the 2′ or 4′ position of the sugar moiety, or replacement of the sugar moiety. Backbone modifications may include, for example, modification or replacement of the phosphodiester linkages, e.g., with one or more phosphorothioates, phosphorodithioates, phosphotriesters, methyl and other alkyl phosphonates, phosphinates, and phosphoramidates.

[0108] As used herein, the term “nucleotide” includes naturally occurring or modified nucleotide, or a surrogate replacement moiety. A modified nucleotide is a non-naturally occurring nucleotide and is also referred to herein as a “nucleotide analog.” One of ordinary skill in the art would understand that guanine, cytosine, adenine, uracil, or thymine in a nucleotide may be replaced by other moieties without substantially altering the base-pairing properties of the modified nucleotide. For example, a nucleotide comprising inosine as its base may base-pair with nucleotides containing adenine, cytosine, or uracil. Hence, nucleotides containing uracil, guanine, or adenine may be replaced in the nucleotide sequences of the present disclosure by a nucleotide containing, for example, inosine. Sequences comprising such replacement moieties are included as embodiments of the present disclosure. A modified nucleotide may also be a nucleotide whose ribose moiety is replaced with a non-ribose moiety.

[0109] The dsRNAs of the present disclosure may include one or more modified nucleotides known in the art, including, without limitation, 2′-O-methyl modified nucleotides, 2′-fluoro modified nucleotides, 2′-deoxy modified nucleotides, 2′-O-methoxyethyl modified nucleotides, modified nucleotides comprising alternate internucleotide linkages such as thiophosphates and phosphorothioates, phosphotriester modified nucleotides, modified nucleotides terminally linked to a cholesterol derivative or lipophilic moiety, peptide nucleic acids (PNAs; see, e.g., Nielsen et al., Science (1991) 254:1497-500), constrained ethyl (cEt) modified nucleotides, inverted deoxy modified nucleotides, inverted dideoxy modified nucleotides, locked nucleic acid modified nucleotides, abasic modifications of nucleotides, 2′-amino modified nucleotides, 2′-alkyl modified nucleotides, morpholino-modified nucleotides, phosphoramidate modified nucleotides, modified nucleotides comprising modifications at other sites of the sugar or base of an oligonucleotide, and non-natural base-containing modified nucleotides. In some embodiments, at least one of the one or more modified nucleotides is a 2′-O-methyl nucleotide, 5′-phosphorothioate nucleotide, or a terminal nucleotide linked to a cholesterol derivative, lipophilic or other targeting moiety. The incorporation of 2′-O-methyl, 2′-O-ethyl, 2′-O-propryl, 2′-O-alkyl, 2′-O-aminoalkyl, or 2′-deoxy-2′-fluoro (i.e., 2′-fluoro) groups in nucleosides of an oligonucleotide may confer enhanced hybridization properties and/or enhanced nuclease stability to the oligonucleotide. Further, oligonucleotides containing phosphorothioate backbones (e.g., phosphorothioate linkage between two neighboring nucleotides at one or more positions of the dsRNA) may have enhanced nuclease stability. In some embodiments, the dsRNA may contain nucleotides with a modified ribose, such as locked nucleic acid (LNA) units.

[0110] In some embodiments, the dsRNA comprises one or more modified nucleotides, wherein at least one of the one or more modified nucleotides is 2′-deoxy-2′-fluoro-ribonucleotide, 2′-deoxyribonucleotide, or 2′-O-methyl-ribonucleotide.

[0111] In some embodiments, the dsRNA comprises an inverted 2′-deoxyribonucleotide at the 3′-end of its sense or antisense strand.

[0112] In some embodiments, a dsRNA of the present disclosure comprises one or more 2′-O-methyl nucleotides and one or more 2′-fluoro nucleotides. In some embodiments, the dsRNA comprises two or more 2′-O-methyl nucleotides and two or more 2′-fluoro nucleotides. In some embodiments, the dsRNA comprises two or more 2′-O-methyl nucleotides (OMe) and two or more 2′-fluoro nucleotides (F) in an alternating pattern, e.g., the pattern OMe-F-OMe-F or the pattern F-OMe-F-OMe. In some embodiments, the sense sequence and the antisense sequence of the dsRNA comprise alternating 2′-O-methyl ribonucleotides and 2′-deoxy-2′-fluoro ribonucleotides. In some embodiments, the dsRNA comprises up to 10 contiguous nucleotides that are each a 2′-O-methyl nucleotide. In some embodiments, the dsRNA comprises up to 10 contiguous nucleotides that are each a 2′-fluoro nucleotide. In some embodiments, the dsRNA comprises two or more 2′-fluoro nucleotides at the 5′- or 3′-end of the antisense strand.

[0113] In some embodiments, a dsRNA of the present disclosure comprises one or more phosphorothioate groups. In some embodiments, a dsRNA of the present disclosure comprises two or more, three or more, four or more, five or more, six or more, seven or more, eight or more, nine or more, or 10 or more phosphorothioate groups. In some embodiments, the dsRNA does not comprise any phosphorothioate group.

[0114] In some embodiments, the dsRNA comprises one or more phosphotriester groups. In some embodiments, the dsRNA comprises two or more, three or more, four or more, five or more, six or more, seven or more, eight or more, nine or more, or 10 or more phosphotriester groups. In some embodiments, the dsRNA does not comprise any phosphotriester group.

[0115] In some embodiments, the dsRNA comprises a modified ribonucleoside such as a deoxyribonucleoside, including, for example, deoxyribonucleoside overhang(s), and one or more deoxyribonucleosides within the double-stranded portion of a dsRNA. However, it is self-evident that under no circumstances is a double-stranded DNA molecule encompassed by the term “dsRNA.” In some embodiments, the dsRNA comprises two or more, three or more, four or more,

[0116] five or more, six or more, seven or more, eight or more, nine or more, or 10 or more different modified nucleotides described herein. In some embodiments, the dsRNA comprises up to two contiguous modified nucleotides, up to three contiguous modified nucleotides, up to four contiguous modified nucleotides, up to five contiguous modified nucleotides, up to six contiguous modified nucleotides, up to seven contiguous modified nucleotides, up to eight contiguous modified nucleotides, up to nine contiguous modified nucleotides, or up to 10 contiguous modified nucleotides. In some embodiments, the contiguous modified nucleotides are the same modified nucleotide. In some embodiments, the contiguous modified nucleotides are two or more, three or more, four or more, five or more, six or more, seven or more, eight or more, nine or more, or ten or more different modified nucleotides.

[0117] In some embodiments, the dsRNA is such that:
[0118] a) the sense strand comprises a nucleotide sequence selected from the group consisting of SEQ ID NOs: 602, 605, 617, 688, 702, 705, 706, 708, 709, 766, 767, 770, 798, 819, 821, 877, and 896; or
[0119] b) the antisense strand comprises a nucleotide sequence selected from the group consisting of SEQ ID NOs: 901, 904, 916, 987, 1001, 1004, 1005, 1007, 1008, 1065, 1066, 1069, 1097, 1118, 1120, 1176, and 1195.

[0120] In some embodiments, the dsRNA is such that:
[0121] a) the sense strand comprises a nucleotide sequence selected from the group consisting of SEQ ID NOs:708, 770, and 821; or
[0122] b) the antisense strand comprises a nucleotide sequence selected from the group consisting of SEQ ID NOs: 1007, 1069, and 1120.

[0123] In some embodiments, the sense strand and antisense strand of the dsRNA respectively comprise the nucleotide sequences of:
[0124] a) SEQ ID NOs: 602 and 901;
[0125] b) SEQ ID NOs: 605 and 904;
[0126] c) SEQ ID NOs: 617 and 916;
[0127] d) SEQ ID NOs: 688 and 987;
[0128] e) SEQ ID NOs: 702 and 1001;
[0129] f) SEQ ID NOs: 705 and 1004;
[0130] g) SEQ ID NOs: 706 and 1005;
[0131] h) SEQ ID NOs: 708 and 1007;
[0132] i) SEQ ID NOs: 709 and 1008;
[0133] j) SEQ ID NOs: 766 and 1065;
[0134] k) SEQ ID NOs: 767 and 1066;
[0135] l) SEQ ID NOs: 770 and 1069;
[0136] m) SEQ ID NOs: 798 and 1097;
[0137] n) SEQ ID NOs: 819 and 1118;
[0138] o) SEQ ID NOs: 821 and 1120;
[0139] p) SEQ ID NOs: 877 and 1176; or
[0140] q) SEQ ID NOs: 896 and 1195.

[0141] In some embodiments, the sense strand and antisense strand of the dsRNA respectively comprise the nucleotide sequences of:
[0142] a) SEQ ID NOs: 708 and 1007;
[0143] b) SEQ ID NOs: 770 and 1069; or
[0144] c) SEQ ID NOs: 821 and 1120.

[0145] Table 2 below lists the sequences of exemplary siRNA constructs (CNST) with modified nucleotides. The start (ST) and end (ED) nucleotide positions in NM_005577.2 (SEQ ID NO: 1632) are indicated. Abbreviations are as follows: SEQ=SEQ ID NO; x (nucleotide in lower case)=2′-O-Me nucleotide (also denoted as mX elsewhere herein); Xf=2′-F nucleotide (also denoted as fX elsewhere herein); dX=DNA nucleotide; and invdX=inverted dX. In these constructs, the sequences of their sense strands and antisense strands correspond to the sense and antisense sequences of the constructs in Table 1 with the same construct numbers, but for the inclusion of (1) the modified 2′-O-Me nucleotides and 2′-F nucleotides, (2) c-c-a at the 5′ end of the sense strand nucleotide sequence, (3) invdT at the 3′ end of the sense strand nucleotide sequence, and/or (4) dT-dT at the 3′ end of the antisense strand nucleotide sequence. In these constructs, a base-pair of nucleotides may be modified differently in some embodiments, e.g., one nucleotide in the base-pair is a 2′-O-Me ribonucleotide and the other is a 2′-F nucleotide. In some embodiments, the antisense strand comprises two 2′-F nucleotides at its 5′ end.

TABLE 2
Sequences of Modified LPA siRNA Constructs

| siLPA | | | Sense Sequence | | Antisense Sequence | |
|---|---|---|---|---|---|---|
| # | ST | ED | (5′-3′) | SEQ | (5′-3′) | SEQ |
| 0001 | 5 | 23 | ccaAfcCfuUfuGfgGfgCf | 599 | GfAfaAfgCfcAfgCfcCf | 898 |
| | | | uGfgCfuUfuCf(invdT) | | cAfaAfgGfudTdT | |
| 0002 | 185 | 203 | ccaGfcCfaUfgUfgGfuCf | 600 | CfAfaUfcCfuGfgAfcCf | 899 |
| | | | cAfgGfaUfuGf(invdT) | | aCfaUfgGfcdTdT | |
| 0003 | 219 | 237 | ccaAfcAfgAfgUfuAfuCf | 601 | CfGfuGfcCfuCfgAfuAf | 900 |
| | | | gAfgGfcAfcGf(invdT) | | aCfuCfuGfudTdT | |
| 0004 | 220 | 238 | ccaCfaGfaGfuUfaUfcGf | 602 | AfCfgUfgCfcUfcGfaUf | 901 |
| | | | aGfgCfaCfgUf(invdT) | | aAfcUfcUfgdTdT | |
| 0005 | 221 | 239 | ccaAfgAfgUfuAfuCfgAf | 603 | UfAfcGfuGfcCfuCfgAf | 902 |
| | | | gGfcAfcGfuAf(invdT) | | uAfaCfuCfudTdT | |
| 0006 | 222 | 240 | ccaGfaGfuUfaUfcGfaGf | 604 | GfUfaCfgUfgCfcUfcGf | 903 |
| | | | gCfaCfgUfaCf(invdT) | | aUfaAfcUfcdTdT | |
| 0007 | 223 | 241 | ccaAfgUfuAfuCfgAfgGf | 605 | AfGfuAfcGfuGfcCfuCf | 904 |
| | | | cAfcGfuAfcUf(invdT) | | gAfuAfaCfudTdT | |
| 0008 | 238 | 256 | ccaUfaCfuCfcAfcCfaCf | 606 | CfUfgUfgAfcAfgUfgGf | 905 |
| | | | uGfuCfaCfaGf(invdT) | | uGfgAfgUfadTdT | |
| 0009 | 240 | 258 | ccaCfuCfcAfcCfaCfuGf | 607 | UfCfcUfgUfgAfcAfgUf | 906 |
| | | | uCfaCfaGfgAf(invdT) | | gGfuGfgAfgdTdT | |
| 0010 | 259 | 277 | ccaAfgGfaCfcUfgCfcAf | 608 | AfCfcAfaGfcUfuGfgCf | 907 |
| | | | aGfcUfuGfgUf(invdT) | | aGfgUfcCfudTdT | |
| 0011 | 261 | 279 | ccaGfaCfcUfgCfcAfaGf | 609 | UfGfaCfcAfaGfcUfuGf | 908 |
| | | | cUfuGfgUfcAf(invdT) | | gCfaGfgUfcdTdT | |
| 0012 | 262 | 280 | ccaAfcCfuGfcCfaAfgCf | 610 | AfUfgAfcCfaAfgCfuUf | 909 |
| | | | uUfgGfuCfaUf(invdT) | | gGfcAfgGfudTdT | |
| 0013 | 263 | 281 | ccaCfcUfgCfcAfaGfcUf | 611 | GfAfuGfaCfcAfaGfcUf | 910 |
| | | | uGfgUfcAfuCf(invdT) | | uGfgCfaGfgdTdT | |
| 0014 | 266 | 284 | ccaGfcCfaAfgCfuUfgGf | 612 | AfUfaGfaUfgAfcCfaAf | 911 |
| | | | uCfaUfcUfaUf(invdT) | | gCfuUfgGfcdTdT | |
| 0015 | 267 | 285 | ccaCfcAfaGfcUfuGfgUf | 613 | CfAfuAfgAfuGfaCfcAf | 912 |
| | | | cAfuCfuAfuGf(invdT) | | aGfcUfuGfgdTdT | |
| 0016 | 298 | 316 | ccaCfaUfaAfuAfgGfaCf | 614 | UfUfuCfuGfuGfgUfcCf | 913 |
| | | | cAfcAfgAfaAf(invdT) | | uAfuUfaUfgdTdT | |
| 0017 | 300 | 318 | ccaUfaAfuAfgGfaCfcAf | 615 | GfUfuUfuCfuGfuGfgUf | 914 |
| | | | cAfgAfaAfaCf(invdT) | | cCfuAfuUfadTdT | |
| 0018 | 301 | 319 | ccaAfaUfaGfgAfcCfaCf | 616 | AfGfuUfuUfcUfgUfgGf | 915 |
| | | | aGfaAfaAfcUf(invdT) | | uCfcUfaUfudTdT | |
| 0019 | 302 | 320 | ccaAfuAfgGfaCfcAfcAf | 617 | UfAfgUfuUfuCfuGfuGf | 916 |
| | | | gAfaAfaCfuAf(invdT) | | gUfcCfuAfudTdT | |
| 0020 | 303 | 321 | ccaUfaGfgAfcCfaCfaGf | 618 | GfUfaGfuUfuUfcUfgUf | 917 |
| | | | aAfaAfcUfaCf(invdT) | | gGfuCfcUfadTdT | |
| 0021 | 324 | 342 | ccaAfaAfuGfcUfgGfcUf | 619 | CfAfuGfaUfcAfaGfcCf | 918 |
| | | | uGfaUfcAfuGf(invdT) | | aGfcAfuUfudTdT | |
| 0022 | 330 | 348 | ccaUfgGfcUfuGfaUfcAf | 620 | GfUfaGfuUfcAfuGfaUf | 919 |
| | | | uGfaAfcUfaCf(invdT) | | cAfaGfcCfadTdT | |
| 0023 | 331 | 349 | ccaGfgCfuUfgAfuCfaUf | 621 | AfGfuAfgUfuCfaUfgAf | 920 |
| | | | gAfaCfuAfcUf(invdT) | | uCfaAfgCfcdTdT | |
| 0024 | 372 | 390 | ccaAfgCfuCfcUfuAfuUf | 622 | CfGfuAfuAfaCfaAfuAf | 921 |
| | | | gUfuAfuAfcGf(invdT) | | aGfgAfgCfudTdT | |
| 0025 | 373 | 391 | ccaGfcUfcCfuUfaUfuGf | 623 | UfCfgUfaUfaAfcAfaUf | 922 |
| | | | uUfaUfaCfgAf(invdT) | | aAfgGfaGfcdTdT | |
| 0026 | 413 | 431 | ccaAfgUfaCfuGfcAfaCf | 624 | UfGfcGfuCfaGfgUfuGf | 923 |
| | | | cUfgAfcGfcAf(invdT) | | cAfgUfaCfudTdT | |
| 0027 | 414 | 432 | ccaGfuAfcUfgCfaAfcCf | 625 | UfUfgCfgUfcAfgGfuUf | 924 |
| | | | uGfaCfgCfaAf(invdT) | | gCfaGfuAfcdTdT | |
| 0028 | 415 | 433 | ccaUfaCfuGfcAfaCfcUf | 626 | AfUfuGfcGfuCfaGfgUf | 925 |
| | | | gAfcGfcAfaUf(invdT) | | uGfcAfgUfadTdT | |
| 0029 | 418 | 436 | ccaUfgCfaAfcCfuGfaCf | 627 | AfGfcAfuUfgCfgUfcAf | 926 |
| | | | gCfaAfuGfcUf(invdT) | | gGfuUfgCfadTdT | |
| 0030 | 419 | 437 | ccaGfcAfaCfcUfgAfcGf | 628 | GfAfgCfaUfuGfcGfuCf | 927 |
| | | | cAfaUfgCfuCf(invdT) | | aGfgUfuGfcdTdT | |
| 0031 | 420 | 438 | ccaCfaAfcCfuGfaCfgCf | 629 | UfGfaGfcAfuUfgCfgUf | 928 |
| | | | aAfuGfcUfcAf(invdT) | | cAfgGfuUfgdTdT | |
| 0032 | 421 | 439 | ccaAfaCfcUfgAfcGfcAf | 630 | CfUfgAfgCfaUfuGfcGf | 929 |
| | | | aUfgCfuCfaGf(invdT) | | uCfaGfgUfudTdT | |
| 0033 | 422 | 440 | ccaAfcCfuGfaCfgCfaAf | 631 | UfCfuGfaGfcAfuUfgCf | 930 |
| | | | uGfcUfcAfgAf(invdT) | | gUfcAfgGfudTdT | |
| 0034 | 423 | 441 | ccaCfcUfgAfcGfcAfaUf | 632 | GfUfcUfgAfgCfaUfuGf | 931 |
| | | | gCfuCfaGfaCf(invdT) | | cGfuCfaGfgdTdT | |
| 0035 | 424 | 442 | ccaCfuGfaCfgCfaAfuGf | 633 | CfGfuCfuGfaGfcAfuUf | 932 |
| | | | cUfcAfgAfcGf(invdT) | | gCfgUfcAfgdTdT | |
| 0036 | 425 | 443 | ccaUfgAfcGfcAfaUfgCf | 634 | GfCfgUfcUfgAfgCfaUf | 933 |
| | | | uCfaGfaCfgCf(invdT) | | uGfcGfuCfadTdT | |
| 0037 | 465 | 483 | ccaUfcCfgAfcUfgUfuAf | 635 | AfAfcCfgGfgGfuAfaCf | 934 |
| | | | cCfcCfgGfuUf(invdT) | | aGfuCfgGfadTdT | |
| 0038 | 469 | 487 | ccaAfcUfgUfuAfcCfcCf | 636 | UfUfgGfaAfcCfgGfgGf | 935 |
| | | | gGfuUfcCfaAf(invdT) | | uAfaCfaGfudTdT | |
| 0039 | 470 | 488 | ccaCfuGfuUfaCfcCfcGf | 637 | CfUfuGfgAfaCfcGfgGf | 936 |
| | | | gUfuCfcAfaGf(invdT) | | gUfaAfcAfgdTdT | |
| 0040 | 471 | 489 | ccaUfgUfuAfcCfcCfgGf | 638 | GfCfuUfgGfaAfcCfgGf | 937 |
| | | | uUfcCfaAfgCf(invdT) | | gGfuAfaCfadTdT | |
| 0041 | 473 | 491 | ccaUfuAfcCfcCfgGfuUf | 639 | AfGfgCfuUfgGfaAfcCf | 938 |
| | | | cCfaAfgCfcUf(invdT) | | gGfgGfuAfadTdT | |
| 0042 | 474 | 492 | ccaUfaCfcCfcGfgUfuCf | 640 | UfAfgGfcUfuGfgAfaCf | 939 |
| | | | cAfaGfcCfuAf(invdT) | | cGfgGfgUfadTdT | |
| 0043 | 480 | 498 | ccaGfgUfuCfcAfaGfcCf | 641 | AfGfcCfuCfuAfgGfcUf | 940 |
| | | | uAfgAfgGfcUf(invdT) | | uGfgAfaCfcdTdT | |
| 0044 | 48 | 499 | ccaGfuUfcCfaAfgCfcUf | 642 | GfAfgCfcUfcUfaGfgCf | 941 |
| | | | aGfaGfgCfuCf(invdT) | | uUfgGfaAfcdTdT | |
| 0045 | 489 | 507 | ccaCfcUfaGfaGfgCfuCf | 643 | UfUfcGfgAfaGfgAfgCf | 942 |
| | | | cUfuCfcGfaAf(invdT) | | cUfcUfaGfgdTdT | |
| 0046 | 490 | 508 | ccaCfuAfgAfgGfcUfcCf | 644 | GfUfuCfgGfaAfgGfaGf | 943 |
| | | | uUfcCfgAfaCf(invdT) | | cCfuCfuAfgdTdT | |
| 0047 | 495 | 513 | ccaGfgCfuCfcUfuCfcGf | 645 | UfGfcUfuGfuUfcGfgAf | 944 |
| | | | aAfcAfaGfcAf(invdT) | | aGfgAfgCfcdTdT | |
| 0048 | 499 | 517 | ccaCfcUfuCfcGfaAfcAf | 646 | UfCfgGfuGfcUfuGfuUf | 945 |
| | | | aGfcAfcCfgAf(invdT) | | cGfgAfaGfgdTdT | |
| 0049 | 500 | 518 | ccaCfuUfcCfgAfaCfaAf | 647 | GfUfcGfgUfgCfuUfgUf | 946 |
| | | | gCfaCfcGfaCf(invdT) | | uCfgGfaAfgdTdT | |
| 0050 | 501 | 519 | ccaUfuCfcGfaAfcAfaGf | 648 | AfGfuCfgGfuGfcUfuGf | 947 |
| | | | cAfcCfgAfcUf(invdT) | | uUfcGfgAfadTdT | |
| 0051 | 502 | 520 | ccaUfcCfgAfaCfaAfgCf | 649 | CfAfgUfcGfgUfgCfuUf | 948 |
| | | | aCfcGfaCfuGf(invdT) | | gUfuCfgGfadTdT | |
| 0052 | 503 | 521 | ccaCfcGfaAfcAfaGfcAf | 650 | UfCfaGfuCfgGfuGfcUf | 949 |
| | | | cCfgAfcUfgAf(invdT) | | uGfuUfcGfgdTdT | |
| 0053 | 505 | 523 | ccaGfaAfcAfaGfcAfcCf | 651 | GfCfuCfaGfuCfgGfuGf | 950 |
| | | | gAfcUfgAfgCf(invdT) | | cUfuGfuUfcdTdT | |
| 0054 | 506 | 524 | ccaAfaCfaAfgCfaCfcGf | 652 | UfGfcUfcAfgUfcGfgUf | 951 |
| | | | aCfuGfaGfcAf(invdT) | | gCfuUfgUfudTdT | |
| 0055 | 507 | 525 | ccaAfcAfaGfcAfcCfgAf | 653 | UfUfgCfuCfaGfuCfgGf | 952 |
| | | | cUfgAfgCfaAf(invdT) | | uGfcUfuGfudTdT | |
| 0056 | 508 | 526 | ccaCfaAfgCfaCfcGfaCf | 654 | UfUfuGfcUfcAfgUfcGf | 953 |
| | | | uGfaGfcAfaAf(invdT) | | gUfgCfuUfgdTdT | |
| 0057 | 509 | 527 | ccaAfaGfcAfcCfgAfcUf | 655 | CfUfuUfgCfuCfaGfuCf | 954 |
| | | | gAfgCfaAfaGf(invdT) | | gGfuGfcUfudTdT | |
| 0058 | 510 | 528 | ccaAfgCfaCfcGfaCfuGf | 656 | CfCfuUfuGfcUfcAfgUf | 955 |
| | | | aGfcAfaAfgGf(invdT) | | cGfgUfgCfudTdT | |
| 0059 | 552 | 570 | ccaUfgGfuAfaUfgGfaCf | 657 | AfUfaAfcUfcUfgUfcCf | 956 |
| | | | aGfaGfuUfaUf(invdT) | | aUfuAfcCfadTdT | |
| 0060 | 554 | 572 | ccaGfuAfaUfgGfaCfaGf | 658 | CfGfaUfaAfcUfcUfgUf | 957 |
| | | | aGfuUfaUfcGf(invdT) | | cCfaUfuAfcdTdT | |
| 0061 | 555 | 573 | ccaUfaAfuGfgAfcAfgAf | 659 | UfCfgAfuAfaCfuCfuGf | 958 |
| | | | gUfuAfuCfgAf(invdT) | | uCfcAfuUfadTdT | |
| 0062 | 563 | 581 | ccaAfgAfgUfuAfuCfgAf | 660 | UfAfuGfuGfcCfuCfgAf | 959 |
| | | | gGfcAfcAfuAf(invdT) | | uAfaCfuCfudTdT | |
| 0063 | 564 | 582 | ccaGfaGfuUfaUfcGfaGf | 661 | GfUfaUfgUfgCfcUfcGf | 960 |
| | | | gCfaCfaUfaCf(invdT) | | aUfaAfcUfcdTdT | |
| 0064 | 565 | 583 | ccaAfgUfuAfuCfgAfgGf | 662 | AfGfuAfuGfuGfcCfuCf | 961 |
| | | | cAfcAfuAfcUf(invdT) | | gAfuAfaCfudTdT | |
| 0065 | 566 | 584 | ccaGfuUfaUfcGfaGfgCf | 663 | GfAfgUfaUfgUfgCfcUf | 962 |
| | | | aCfaUfaCfuCf(invdT) | | CGfaUfaAfcdTdT | |
| 0066 | 567 | 585 | ccaUfuAfuCfgAfgGfcAf | 664 | GfGfaGfuAfuGfuGfcCf | 963 |
| | | | cAfuAfcUfcCf(invdT) | | uCfgAfuAfadTdT | |
| 0067 | 574 | 592 | ccaGfgCfaCfaUfaCfuCf | 665 | CfAfgUfgGfuGfgAfgUf | 964 |
| | | | cAfcCfaCfuGf(invdT) | | aUfgUfgCfcdTdT | |
| 0068 | 578 | 596 | ccaCfaUfaCfuCfcAfcCf | 666 | GfUfgAfcAfgUfgGfuGf | 965 |
| | | | aCfuGfuCfaCf(invdT) | | gAfgUfaUfgdTdT | |
| 0069 | 598 | 616 | ccaGfgAfaGfaAfcCfuGf | 667 | AfAfgCfuUfgGfcAfgGf | 966 |
| | | | cCfaAfgCfuUf(invdT) | | uUfcUfuCfcdTdT | |
| 0070 | 624 | 642 | ccaUfaUfgAfcAfcCfaCf | 668 | AfUfgCfgAfgUfgUfgGf | 967 |
| | | | aCfuCfgCfaUf(invdT) | | uGfuCfaUfadTdT | |
| 0071 | 625 | 643 | ccaAfuGfaCfaCfcAfcAf | 669 | UfAfuGfcGfaGfuGfuGf | 968 |
| | | | cUfcGfcAfuAf(invdT) | | gUfgUfcAfudTdT | |
| 0072 | 626 | 644 | ccaUfgAfcAfcCfaCfaCf | 670 | CfUfaUfgCfgAfgUfgUf | 969 |
| | | | uCfgCfaUfaGf(invdT) | | gGfuGfuCfadTdT | |
| 0073 | 627 | 645 | ccaGfaCfaCfcAfcAfcUf | 671 | AfCfuAfuGfcGfaGfuGf | 970 |
| | | | cGfcAfuAfgUf(invdT) | | uGfgUfgUfcdTdT | |
| 0074 | 628 | 646 | ccaAfcAfcCfaCfaCfuCf | 672 | GfAfcUfaUfgCfgAfgUf | 971 |
| | | | gCfaUfaGfuCf(invdT) | | gUfgGfuGfudTdT | |
| 0075 | 630 | 648 | ccaAfcCfaCfaCfuCfgCf | 673 | CfCfgAfcUfaUfgCfgAf | 972 |
| | | | aUfaGfuCfgGf(invdT) | | gUfgUfgGfudTdT | |
| 0076 | 63 | 649 | ccaCfcAfcAfcUfcGfcAf | 674 | UfCfcGfaCfuAfuGfcGf | 973 |
| | | | uAfgUfcGfgAf(invdT) | | aGfuGfuGfgdTdT | |
| 0077 | 632 | 650 | ccaCfaCfaCfuCfgCfaUf | 675 | GfUfcCfgAfcUfaUfgCf | 974 |
| | | | aGfuCfgGfaCf(invdT) | | gAfgUfgUfgdTdT | |
| 0078 | 633 | 651 | ccaAfcAfcUfcGfcAfuAf | 676 | GfGfuCfcGfaCfuAfuGf | 975 |
| | | | gUfcGfgAfcCf(invdT) | | CGfaGfuGfudTdT | |
| 0079 | 640 | 658 | ccaCfaUfaGfuCfgGfaCf | 677 | AfUfuCfuGfgGfgUfcCf | 976 |
| | | | cCfcAfgAfaUf(invdT) | | gAfcUfaUfgdTdT | |
| 0080 | 641 | 659 | ccaAfuAfgUfcGfgAfcCf | 678 | UfAfuUfcUfgGfgGfuCf | 977 |
| | | | cCfaGfaAfuAf(invdT) | | cGfaCfuAfudTdT | |
| 0081 | 642 | 660 | ccaUfaGfuCfgGfaCfcCf | 679 | GfUfaUfuCfuGfgGfgUf | 978 |
| | | | cAfgAfaUfaCf(invdT) | | cCfgAfcUfadTdT | |
| 0082 | 643 | 661 | ccaAfgUfcGfgAfcCfcCf | 680 | AfGfuAfuUfcUfgGfgGf | 979 |
| | | | aGfaAfuAfcUf(invdT) | | uCfcGfaCfudTdT | |
| 0083 | 644 | 662 | ccaGfuCfgGfaCfcCfcAf | 681 | UfAfgUfaUfuCfuGfgGf | 980 |
| | | | gAfaUfaCfuAf(invdT) | | gUfcCfgAfcdTdT | |
| 0084 | 645 | 663 | ccaUfcGfgAfcCfcCfaGf | 682 | GfUfaGfuAfuUfcUfgGf | 981 |
| | | | aAfuAfcUfaCf(invdT) | | gGfuCfcGfadTdT | |
| 0085 | 646 | 664 | ccaCfgGfaCfcCfcAfgAf | 683 | GfGfuAfgUfaUfuCfuGf | 982 |
| | | | aUfaCfuAfcCf(invdT) | | gGfgUfcCfgdTdT | |
| 0086 | 1191 | 1209 | ccaAfcAfaGfcAfcCfgAf | 684 | CfUfgCfuCfaGfuCfgGf | 983 |
| | | | cUfgAfgCfaGf(invdT) | | uGfcUfuGfudTdT | |
| 0087 | 1193 | 1211 | ccaAfaGfcAfcCfgAfcUf | 685 | CfUfcUfgCfuCfaGfuCf | 984 |
| | | | gAfgCfaGfaGf(invdT) | | gGfuGfcUfudTdT | |
| 0088 | 1234 | 1252 | ccaCfaCfgGfuAfaUfgGf | 686 | AfAfcUfcUfgUfcCfaUf | 985 |
| | | | aCfaGfaGfuUf(invdT) | | uAfcCfgUfgdTdT | |
| 0089 | 1235 | 1253 | ccaAfcGfgUfaAfuGfgAf | 687 | UfAfaCfuCfuGfuCfcAf | 986 |
| | | | cAfgAfgUfuAf(invdT) | | uUfaCfcGfudTdT | |
| 0090 | 1236 | 1254 | ccaCfgGfuAfaUfgGfaCf | 688 | AfUfaAfcUfcUfgUfcCf | 987 |
| | | | aGfaGfuUfaUf(invdT) | | aUfuAfcCfgdTdT | |
| 0091 | 2867 | 2885 | ccaUfuAfcCfcCfgAfuUf | 689 | AfGfgCfuUfgGfaAfuCf | 988 |
| | | | cCfaAfgCfcUf(invdT) | | gGfgGfuAfadTdT | |
| 0092 | 2868 | 2886 | ccaUfaCfcCfcGfaUfuCf | 690 | UfAfgGfcUfuGfgAfaUf | 989 |
| | | | cAfaGfcCfuAf(invdT) | | cGfgGfgUfadTdT | |
| 0093 | 2869 | 2887 | ccaAfcCfcCfgAfuUfcCf | 691 | CfUfaGfgCfuUfgGfaAf | 990 |
| | | | aAfgCfcUfaGf(invdT) | | uCfgGfgGfudTdT | |
| 0094 | 2870 | 2888 | ccaCfcCfcGfaUfuCfcAf | 692 | UfCfuAfgGfcUfuGfgAf | 991 |
| | | | aGfcCfuAfgAf(invdT) | | aUfcGfgGfgdTdT | |
| 0095 | 2871 | 2889 | ccaCfcCfgAfuUfcCfaAf | 693 | CfUfcUfaGfgCfuUfgGf | 992 |
| | | | gCfcUfaGfaGf(invdT) | | aAfuCfgGfgdTdT | |
| 0096 | 2872 | 2890 | ccaCfcGfaUfuCfcAfaGf | 694 | CfCfuCfuAfgGfcUfuGf | 993 |
| | | | cCfuAfgAfgGf(invdT) | | gAfaUfcGfgdTdT | |
| 0097 | 2873 | 2891 | ccaCfgAfuUfcCfaAfgCf | 695 | GfCfcUfcUfaGfgCfuUf | 994 |
| | | | cUfaGfaGfgCf(invdT) | | gGfaAfuCfgdTdT | |
| 0098 | 2874 | 2892 | ccaGfaUfuCfcAfaGfcCf | 696 | AfGfcCfuCfuAfgGfcUf | 995 |
| | | | uAfgAfgGfcUf(invdT) | | uGfgAfaUfcdTdT | |
| 0099 | 2907 | 2925 | ccaAfcCfaAfcUfgAfgCf | 697 | AfGfgCfcUfuUfgCfuCf | 996 |
| | | | aAfaGfgCfcUf(invdT) | | aGfuUfgGfudTdT | |
| 0100 | 2941 | 2959 | ccaUfaCfcAfcGfgAfaAf | 698 | UfCfuGfuCfcAfuUfuCf | 997 |
| | | | uGfgAfcAfgAf(invdT) | | cGfuGfgUfadTdT | |
| 0101 | 2942 | 2960 | ccaAfcCfaCfgGfaAfaUf | 699 | CfUfcUfgUfcCfaUfuUf | 998 |
| | | | gGfaCfaGfaGf(invdT) | | cCfgUfgGfudTdT | |
| 0102 | 2944 | 2962 | ccaCfaCfgGfaAfaUfgGf | 700 | AfAfcUfcUfgUfcCfaUf | 999 |
| | | | aCfaGfaGfuUf(invdT) | | uUfcCfgUfgdTdT | |
| 0103 | 2945 | 2963 | ccaAfcGfgAfaAfuGfgAf | 701 | UfAfaCfuCfuGfuCfcAf | 1000 |
| | | | cAfgAfgUfuAf(invdT) | | uUfuCfcGfudTdT | |
| 0104 | 2946 | 2964 | ccaCfgGfaAfaUfgGfaCf | 702 | AfUfaAfcUfcUfgUfcCf | 1001 |
| | | | aGfaGfuUfaUf(invdT) | | aUfuUfcCfgdTdT | |
| 0105 | 2950 | 2968 | ccaAfaUfgGfaCfaGfaGf | 703 | CfUfuGfaUfaAfcUfcUf | 1002 |
| | | | uUfaUfcAfaGf(invdT) | | gUfcCfaUfudTdT | |
| 0106 | 2951 | 2969 | ccaAfuGfgAfcAfgAfgUf | 704 | CfCfuUfgAfuAfaCfuCf | 1003 |
| | | | uAfuCfaAfgGf(invdT) | | uGfuCfcAfudTdT | |
| 0107 | 2953 | 2971 | ccaGfgAfcAfgAfgUfuAf | 705 | UfGfcCfuUfgAfuAfaCf | 1004 |
| | | | uCfaAfgGfcAf(invdT) | | uCfuGfuCfcdTdT | |
| 0108 | 2954 | 2972 | ccaGfaCfaGfaGfuUfaUf | 706 | GfUfgCfcUfuGfaUfaAf | 1005 |
| | | | cAfaGfgCfaCf(invdT) | | cUfcUfgUfcdTdT | |
| 0109 | 2955 | 2973 | ccaAfcAfgAfgUfuAfuCf | 707 | UfGfuGfcCfuUfgAfuAf | 1006 |
| | | | aAfgGfcAfcAf(invdT) | | aCfuCfuGfudTdT | |
| 0110 | 2958 | 2976 | ccaGfaGfuUfaUfcAfaGf | 708 | GfUfaUfgUfgCfcUfuGf | 1007 |
| | | | gCfaCfaUfaCf(invdT) | | aUfaAfcUfcdTdT | |
| 0111 | 2959 | 2977 | ccaAfgUfuAfuCfaAfgGf | 709 | AfGfuAfuGfuGfcCfuUf | 1008 |
| | | | cAfcAfuAfcUf(invdT) | | gAfuAfaCfudTdT | |
| 0112 | 2960 | 2978 | ccaGfuUfaUfcAfaGfgCf | 710 | AfAfgUfaUfgUfgCfcUf | 1009 |
| | | | aCfaUfaCfuUf(invdT) | | uGfaUfaAfcdTdT | |
| 0113 | 3060 | 3078 | ccaAfaAfuGfcUfgGfcUf | 711 | CfUfuGfaUfcAfaGfcCf | 1010 |
| | | | uGfaUfcAfaGf(invdT) | | aGfcAfuUfudTdT | |
| 0114 | 3068 | 3086 | ccaGfcUfuGfaUfcAfaGf | 712 | CfAfgUfaGfuUfcUfuGf | 1011 |
| | | | aAfcUfaCfuGf(invdT) | | aUfcAfaGfcdTdT | |
| 0115 | 3109 | 3127 | ccaGfcCfcCfuUfgGfuGf | 713 | UfUfgUfaUfaAfcAfcCf | 1012 |
| | | | uUfaUfaCfaAf(invdT) | | aAfgGfgGfcdTdT | |
| 0116 | 3111 | 3129 | ccaCfcCfuUfgGfuGfuUf | 714 | UfGfuUfgUfaUfaAfcAf | 1013 |
| | | | aUfaCfaAfcAf(invdT) | | cCfaAfgGfgdTdT | |
| 0117 | 3114 | 3132 | ccaUfuGfgUfgUfuAfuAf | 715 | AfUfcUfgUfuGfuAfuAf | 1014 |
| | | | cAfaCfaGfaUf(invdT) | | aCfaCfcAfadTdT | |
| 0118 | 3117 | 3135 | ccaGfuGfuUfaUfaCfaAf | 716 | GfGfgAfuCfuGfuUfgUf | 1015 |
| | | | cAfgAfuCfcCf(invdT) | | aUfaAfcAfcdTdT | |
| 0119 | 3121 | 3139 | ccaUfaUfaCfaAfcAfgAf | 717 | CfAfcUfgGfgAfuCfuGf | 1016 |
| | | | uCfcCfaGfuGf(invdT) | | uUfgUfaUfadTdT | |
| 0120 | 3496 | 3514 | ccaUfgCfaAfcCfuGfaCf | 718 | GfGfcAfuUfgUfgUfcAf | 1017 |
| | | | aCfaAfuGfcCf(invdT) | | gGfuUfgCfadTdT | |
| 0121 | 3497 | 3515 | ccaGfcAfaCfcUfgAfcAf | 719 | AfGfgCfaUfuGfuGfuCf | 1018 |
| | | | cAfaUfgCfcUf(invdT) | | aGfgUfuGfcdTdT | |
| 0122 | 3540 | 3558 | ccaAfaCfuCfuCfaCfgGf | 720 | UfGfgGfaCfcAfcCfgUf | 1019 |
| | | | uGfgUfcCfcAf(invdT) | | gAfgAfgUfudTdT | |
| 0123 | 3543 | 3561 | ccaUfcUfcAfcGfgUfgGf | 721 | AfUfcUfgGfgAfcCfaCf | 1020 |
| | | | uCfcCfaGfaUf(invdT) | | cGfuGfaGfadTdT | |
| 0124 | 3547 | 3565 | ccaAfcGfgUfgGfuCfcCf | 722 | UfUfgGfaUfcUfgGfgAf | 1021 |
| | | | aGfaUfcCfaAf(invdT) | | cCfaCfcGfudTdT | |
| 0125 | 3551 | 3569 | ccaUfgGfuCfcCfaGfaUf | 723 | GfUfgCfuUfgGfaUfcUf | 1022 |
| | | | cCfaAfgCfaCf(invdT) | | gGfgAfcCfadTdT | |
| 0126 | 3554 | 3572 | ccaUfcCfcAfgAfuCfcAf | 724 | UfCfuGfuGfcUfuGfgAf | 1023 |
| | | | aGfcAfcAfgAf(invdT) | | uCfuGfgGfadTdT | |
| 0127 | 3558 | 3576 | ccaAfgAfuCfcAfaGfcAf | 725 | AfGfcCfuCfuGfuGfcUf | 1024 |
| | | | cAfgAfgGfcUf(invdT) | | uGfgAfuCfudTdT | |
| 0128 | 3559 | 3577 | ccaGfaUfcCfaAfgCfaCf | 726 | AfAfgCfcUfcUfgUfgCf | 1025 |
| | | | aGfaGfgCfuUf(invdT) | | uUfgGfaUfcdTdT | |
| 0129 | 3560 | 3578 | ccaAfuCfcAfaGfcAfcAf | 727 | GfAfaGfcCfuCfuGfuGf | 1026 |
| | | | gAfgGfcUfuCf(invdT) | | cUfuGfgAfudTdT | |
| 0130 | 3662 | 3680 | ccaCfuAfcCfaCfuGfuCf | 728 | CfUfuCfcUfgUfgAfcAf | 1027 |
| | | | aCfaGfgAfaGf(invdT) | | gUfgGfuAfgdTdT | |
| 0131 | 4155 | 4173 | ccaCfuGfcAfaCfcUfgAf | 729 | AfCfaUfuGfcGfuCfaGf | 1028 |
| | | | cGfcAfaUfgUf(invdT) | | gUfuGfcAfgdTdT | |
| 0132 | 4156 | 4174 | ccaUfgCfaAfcCfuGfaCf | 730 | GfAfcAfuUfgCfgUfcAf | 1029 |
| | | | gCfaAfuGfuCf(invdT) | | gGfuUfgCfadTdT | |
| 0133 | 4157 | 4175 | ccaGfcAfaCfcUfgAfcGf | 731 | GfGfaCfaUfuGfcGfuCf | 1030 |
| | | | cAfaUfgUfcCf(invdT) | | aGfgUfuGfcdTdT | |
| 0134 | 4256 | 4274 | ccaCfuGfaAfaAfcAfgCf | 732 | AfCfcCfcAfgUfgCfuGf | 1031 |
| | | | aCfuGfgGfgUf(invdT) | | uUfuUfcAfgdTdT | |
| 0135 | 4300 | 4318 | ccaCfaGfaGfuUfaUfcGf | 733 | GfUfgUfgCfcUfcGfaUf | 1032 |
| | | | aGfgCfaCfaCf(invdT) | | aAfcUfcUfgdTdT | |
| 0136 | 4301 | 4319 | ccaAfgAfgUfuAfuCfgAf | 734 | AfGfuGfuGfcCfuCfgAf | 1033 |
| | | | gGfcAfcAfcUf(invdT) | | uAfaCfuCfudTdT | |
| 0137 | 4302 | 4320 | ccaGfaGfuUfaUfcGfaGf | 735 | GfAfgUfgUfgCfcUfcGf | 1034 |
| | | | gCfaCfaCfuCf(invdT) | | aUfaAfcUfcdTdT | |
| 0138 | 4303 | 4321 | ccaAfgUfuAfuCfgAfgGf | 736 | AfGfaGfuGfuGfcCfuCf | 1035 |
| | | | cAfcAfcUfcUf(invdT) | | gAfuAfaCfudTdT | |
| 0139 | 4304 | 4322 | ccaGfuUfaUfcGfaGfgCf | 737 | GfAfgAfgUfgUfgCfcUf | 1036 |
| | | | aCfaCfuCfuCf(invdT) | | CGfaUfaAfcdTdT | |
| 0140 | 4305 | 4323 | ccaUfuAfuCfgAfgGfcAf | 738 | GfGfaGfaGfuGfuGfcCf | 1037 |
| | | | cAfcUfcUfcCf(invdT) | | uCfgAfuAfadTdT | |
| 0141 | 4306 | 4324 | ccaUfaUfcGfaGfgCfaCf | 739 | UfGfgAfgAfgUfgUfgCf | 1038 |
| | | | aCfuCfuCfcAf(invdT) | | cUfcGfaUfadTdT | |
| 0142 | 4307 | 4325 | ccaAfuCfgAfgGfcAfcAf | 740 | GfUfgGfaGfaGfuGfuGf | 1039 |
| | | | cUfcUfcCfaCf(invdT) | | cCfuCfgAfudTdT | |
| 0143 | 4312 | 4330 | ccaGfgCfaCfaCfuCfuCf | 741 | UfAfgUfgGfuGfgAfgAf | 1040 |
| | | | cAfcCfaCfuAf(invdT) | | gUfgUfgCfcdTdT | |
| 0144 | 4319 | 4337 | ccaUfcUfcCfaCfcAfcUf | 742 | CfCfuGfuGfaUfaGfuGf | 1041 |
| | | | aUfcAfcAfgGf(invdT) | | gUfgGfaGfadTdT | |
| 0145 | 4359 | 4377 | ccaGfuCfuAfuGfaCfaCf | 743 | CfCfaAfuGfuGfgUfgUf | 1042 |
| | | | cAfcAfuUfgGf(invdT) | | cAfuAfgAfcdTdT | |
| 0146 | 4362 | 4380 | ccaUfaUfgAfcAfcCfaCf | 744 | AfUfgCfcAfaUfgUfgGf | 1043 |
| | | | aUfuGfgCfaUf(invdT) | | uGfuCfaUfadTdT | |
| 0147 | 4366 | 4384 | ccaAfcAfcCfaCfaUfuGf | 745 | UfCfcGfaUfgCfcAfaUf | 1044 |
| | | | gCfaUfcGfgAf(invdT) | | gUfgGfuGfudTdT | |
| 0148 | 4367 | 4385 | ccaCfaCfcAfcAfuUfgGf | 746 | CfUfcCfgAfuGfcCfaAf | 1045 |
| | | | cAfuCfgGfaGf(invdT) | | uGfuGfgUfgdTdT | |
| 0149 | 4368 | 4386 | ccaAfcCfaCfaUfuGfgCf | 747 | CfCfuCfcGfaUfgCfcAf | 1046 |
| | | | aUfcGfgAfgGf(invdT) | | aUfgUfgGfudTdT | |
| 0150 | 4369 | 4387 | ccaCfcAfcAfuUfgGfcAf | 748 | UfCfcUfcCfgAfuGfcCf | 1047 |
| | | | uCfgGfaGfgAf(invdT) | | aAfuGfuGfgdTdT | |
| 0151 | 4370 | 4388 | ccaCfaCfaUfuGfgCfaUf | 749 | AfUfcCfuCfcGfaUfgCf | 1048 |
| | | | cGfgAfgGfaUf(invdT) | | cAfaUfgUfgdTdT | |
| 0152 | 4371 | 4389 | ccaAfcAfuUfgGfcAfuCf | 750 | GfAfuCfcUfcCfgAfuGf | 1049 |
| | | | gGfaGfgAfuCf(invdT) | | cCfaAfuGfudTdT | |
| 0153 | 4372 | 4390 | ccaCfaUfuGfgCfaUfcGf | 751 | GfGfaUfcCfuCfcGfaUf | 1050 |
| | | | gAfgGfaUfcCf(invdT) | | gCfcAfaUfgdTdT | |
| 0154 | 4373 | 4391 | ccaAfuUfgGfcAfuCfgGf | 752 | GfGfgAfuCfcUfcCfgAf | 1051 |
| | | | aGfgAfuCfcCf(invdT) | | uGfcCfaAfudTdT | |
| 0155 | 4376 | 4394 | ccaGfgCfaUfcGfgAfgGf | 753 | AfAfuGfgGfaUfcCfuCf | 1052 |
| | | | aUfcCfcAfuUf(invdT) | | cGfaUfgCfcdTdT | |
| 0156 | 4497 | 4515 | ccaCfuGfcAfaCfcUfgAf | 754 | AfCfaUfcGfuGfuCfaGf | 1053 |
| | | | cAfcGfaUfgUf(invdT) | | gUfuGfcAfgdTdT | |
| 0157 | 4498 | 4516 | ccaUfgCfaAfcCfuGfaCf | 755 | GfAfcAfuCfgUfgUfcAf | 1054 |
| | | | aCfgAfuGfuCf(invdT) | | gGfuUfgCfadTdT | |
| 0158 | 4499 | 4517 | ccaGfcAfaCfcUfgAfcAf | 756 | GfGfaCfaUfcGfuGfuCf | 1055 |
| | | | cGfaUfgUfcCf(invdT) | | aGfgUfuGfcdTdT | |
| 0159 | 4500 | 4518 | ccaCfaAfcCfuGfaCfaCf | 757 | UfGfgAfcAfuCfgUfgUf | 1056 |
| | | | gAfuGfuCfcAf(invdT) | | cAfgGfuUfgdTdT | |
| 0160 | 4501 | 4519 | ccaAfaCfcUfgAfcAfcGf | 758 | CfUfgGfaCfaUfcGfuGf | 1057 |
| | | | aUfgUfcCfaGf(invdT) | | uCfaGfgUfudTdT | |
| 0161 | 4503 | 4521 | ccaCfcUfgAfcAfcGfaUf | 759 | CfAfcUfgGfaCfaUfcGf | 1058 |
| | | | gUfcCfaGfuGf(invdT) | | uGfuCfaGfgdTdT | |
| 0162 | 4504 | 4522 | ccaCfuGfaCfaCfgAfuGf | 760 | UfCfaCfuGfgAfcAfuCf | 1059 |
| | | | uCfcAfgUfgAf(invdT) | | gUfgUfcAfgdTdT | |
| 0163 | 4505 | 4523 | ccaUfgAfcAfcGfaUfgUf | 761 | GfUfcAfcUfgGfaCfaUf | 1060 |
| | | | cCfaGfuGfaCf(invdT) | | cGfuGfuCfadTdT | |
| 0164 | 4506 | 4524 | ccaGfaCfaCfgAfuGfuCf | 762 | UfGfuCfaCfuGfgAfcAf | 1061 |
| | | | cAfgUfgAfcAf(invdT) | | uCfgUfgUfcdTdT | |
| 0165 | 4507 | 4525 | ccaAfcAfcGfaUfgUfcCf | 763 | CfUfgUfcAfcUfgGfaCf | 1062 |
| | | | aGfuGfaCfaGf(invdT) | | aUfcGfuGfudTdT | |
| 0166 | 4510 | 4528 | ccaCfgAfuGfuCfcAfgUf | 764 | AfUfuCfuGfuCfaCfuGf | 1063 |
| | | | gAfcAfgAfaUf(invdT) | | gAfcAfuCfgdTdT | |
| 0167 | 4634 | 4652 | ccaGfuGfaUfgGfaCfgGf | 765 | CfGfaUfaAfcUfcCfgUf | 1064 |
| | | | aGfuUfaUfcGf(invdT) | | cCfaUfcAfcdTdT | |
| 0168 | 4635 | 4653 | ccaUfgAfuGfgAfcGfgAf | 766 | UfCfgAfuAfaCfuCfcGf | 1065 |
| | | | gUfuAfuCfgAf(invdT) | | uCfcAfuCfadTdT | |
| 0169 | 4636 | 4654 | ccaGfaUfgGfaCfgGfaGf | 767 | CfUfcGfaUfaAfcUfcCf | 1066 |
| | | | uUfaUfcGfaGf(invdT) | | gUfcCfaUfcdTdT | |
| 0170 | 4637 | 4655 | ccaAfuGfgAfcGfgAfgUf | 768 | CfCfuCfgAfuAfaCfuCf | 1067 |
| | | | uAfuCfgAfgGf(invdT) | | cGfuCfcAfudTdT | |
| 0171 | 4638 | 4656 | ccaUfgGfaCfgGfaGfuUf | 769 | GfCfcUfcGfaUfaAfcUf | 1068 |
| | | | aUfcGfaGfgCf(invdT) | | cCfgUfcCfadTdT | |
| 0172 | 4639 | 4657 | ccaGfgAfcGfgAfgUfuAf | 770 | UfGfcCfuCfgAfuAfaCf | 1069 |
| | | | uCfgAfgGfcAf(invdT) | | uCfcGfuCfcdTdT | |
| 0173 | 4644 | 4662 | ccaGfaGfuUfaUfcGfaGf | 771 | GfGfaUfaUfgCfcUfcGf | 1070 |
| | | | gCfaUfaUfcCf(invdT) | | aUfaAfcUfcdTdT | |
| 0174 | 4645 | 4663 | ccaAfgUfuAfuCfgAfgGf | 772 | AfGfgAfuAfuGfcCfuCf | 1071 |
| | | | cAfuAfuCfcUf(invdT) | | gAfuAfaCfudTdT | |
| 0175 | 4646 | 4664 | ccaGfuUfaUfcGfaGfgCf | 773 | GfAfgGfaUfaUfgCfcUf | 1072 |
| | | | aUfaUfcCfuCf(invdT) | | CGfaUfaAfcdTdT | |
| 0176 | 4647 | 4665 | ccaUfuAfuCfgAfgGfcAf | 774 | GfGfaGfgAfuAfuGfcCf | 1073 |
| | | | uAfuCfcUfcCf(invdT) | | uCfgAfuAfadTdT | |
| 0177 | 4678 | 4696 | ccaGfgAfaGfgAfcCfuGf | 775 | AfAfgAfuUfgAfcAfgGf | 1074 |
| | | | uCfaAfuCfuUf(invdT) | | uCfcUfuCfcdTdT | |
| 0178 | 4680 | 4698 | ccaAfaGfgAfcCfuGfuCf | 776 | CfCfaAfgAfuUfgAfcAf | 1075 |
| | | | aAfuCfuUfgGf(invdT) | | gGfuCfcUfudTdT | |
| 0179 | 4681 | 4699 | ccaAfgGfaCfcUfgUfcAf | 777 | AfCfcAfaGfaUfuGfaCf | 1076 |
| | | | aUfcUfuGfgUf(invdT) | | aGfgUfcCfudTdT | |
| 0180 | 4682 | 4700 | ccaGfgAfcCfuGfuCfaAf | 778 | GfAfcCfaAfgAfuUfgAf | 1077 |
| | | | uCfuUfgGfuCf(invdT) | | cAfgGfuCfcdTdT | |
| 0181 | 4753 | 4771 | ccaGfgCfcUfgAfcCfgAf | 779 | AfGfuAfgUfuCfuCfgGf | 1078 |
| | | | gAfaCfuAfcUf(invdT) | | uCfaGfgCfcdTdT | |
| 0182 | 4755 | 4773 | ccaCfcUfgAfcCfgAfgAf | 780 | GfCfaGfuAfgUfuCfuCf | 1079 |
| | | | aCfuAfcUfgCf(invdT) | | gGfuCfaGfgdTdT | |
| 0183 | 4756 | 4774 | ccaCfuGfaCfcGfaGfaAf | 781 | UfGfcAfgUfaGfuUfcUf | 1080 |
| | | | cUfaCfuGfcAf(invdT) | | cGfgUfcAfgdTdT | |
| 0184 | 4757 | 4775 | ccaUfgAfcCfgAfgAfaCf | 782 | CfUfgCfaGfuAfgUfuCf | 1081 |
| | | | uAfcUfgCfaGf(invdT) | | uCfgGfuCfadTdT | |
| 0185 | 4775 | 4793 | ccaGfgAfaUfcCfaGfaUf | 783 | UfUfcCfcAfgAfaUfcUf | 1082 |
| | | | uCfuGfgGfaAf(invdT) | | gGfaUfuCfcdTdT | |
| 0186 | 4777 | 4795 | ccaAfaUfcCfaGfaUfuCf | 784 | GfUfuUfcCfcAfgAfaUf | 1083 |
| | | | uGfgGfaAfaCf(invdT) | | cUfgGfaUfudTdT | |
| 0187 | 4786 | 4804 | ccaUfcUfgGfgAfaAfcAf | 785 | AfCfcAfgGfgUfuGfuUf | 1084 |
| | | | aCfcCfuGfgUf(invdT) | | uCfcCfaGfadTdT | |
| 0188 | 4787 | 4805 | ccaCfuGfgGfaAfaCfaAf | 786 | CfAfcCfaGfgGfuUfgUf | 1085 |
| | | | cCfcUfgGfuGf(invdT) | | uUfcCfcAfgdTdT | |
| 0189 | 4789 | 4807 | ccaGfgGfaAfaCfaAfcCf | 787 | AfAfcAfcCfaGfgGfuUf | 1086 |
| | | | cUfgGfuGfuUf(invdT) | | gUfuUfcCfcdTdT | |
| 0190 | 4791 | 4809 | ccaGfaAfaCfaAfcCfcUf | 788 | GfUfaAfcAfcCfaGfgGf | 1087 |
| | | | gGfuGfuUfaCf(invdT) | | uUfgUfuUfcdTdT | |
| 0191 | 4792 | 4810 | ccaAfaAfcAfaCfcCfuGf | 789 | UfGfuAfaCfaCfcAfgGf | 1088 |
| | | | gUfgUfuAfcAf(invdT) | | gUfuGfuUfudTdT | |
| 0192 | 4793 | 4811 | ccaAfaCfaAfcCfcUfgGf | 790 | GfUfgUfaAfcAfcCfaGf | 1089 |
| | | | uGfuUfaCfaCf(invdT) | | gGfuUfgUfudTdT | |
| 0193 | 4794 | 4812 | ccaAfcAfaCfcCfuGfgUf | 791 | UfGfuGfuAfaCfaCfcAf | 1090 |
| | | | gUfuAfcAfcAf(invdT) | | gGfgUfuGfudTdT | |
| 0194 | 4795 | 4813 | ccaCfaAfcCfcUfgGfuGf | 792 | UfUfgUfgUfaAfcAfcCf | 1091 |
| | | | uUfaCfaCfaAf(invdT) | | aGfgGfuUfgdTdT | |
| 0195 | 4796 | 4814 | ccaAfaCfcCfuGfgUfgUf | 793 | GfUfuGfuGfuAfaCfaCf | 1092 |
| | | | uAfcAfcAfaCf(invdT) | | cAfgGfgUfudTdT | |
| 0196 | 4820 | 4838 | ccaCfgUfgUfgUfgAfgGf | 794 | UfAfcUfcCfcAfcCfuCf | 1093 |
| | | | uGfgGfaGfuAf(invdT) | | aCfaCfaCfgdTdT | |
| 0197 | 4834 | 4852 | ccaGfaGfuAfcUfgCfaAf | 795 | GfUfgUfcAfgAfuUfgCf | 1094 |
| | | | uCfuGfaCfaCf(invdT) | | aGfuAfcUfcdTdT | |
| 0198 | 4840 | 4858 | ccaUfgCfaAfuCfuGfaCf | 796 | AfGfcAfuUfgUfgUfcAf | 1095 |
| | | | aCfaAfuGfcUf(invdT) | | gAfuUfgCfadTdT | |
| 0199 | 4841 | 4859 | ccaGfcAfaUfcUfgAfcAf | 797 | GfAfgCfaUfuGfuGfuCf | 1096 |
| | | | cAfaUfgCfuCf(invdT) | | aGfaUfuGfcdTdT | |
| 0200 | 4842 | 4860 | ccaCfaAfuCfuGfaCfaCf | 798 | UfGfaGfcAfuUfgUfgUf | 1097 |
| | | | aAfuGfcUfcAf(invdT) | | cAfgAfuUfgdTdT | |
| 0201 | 4886 | 4904 | ccaCfuCfcCfaCfuGfuUf | 799 | AfCfuGfgAfaCfaAfcAf | 1098 |
| | | | gUfuCfcAfgUf(invdT) | | gUfgGfgAfgdTdT | |
| 0202 | 4887 | 4905 | ccaUfcCfcAfcUfgUfuGf | 800 | AfAfcUfgGfaAfcAfaCf | 1099 |
| | | | uUfcCfaGfuUf(invdT) | | aGfuGfgGfadTdT | |
| 0203 | 4889 | 4907 | ccaCfcAfcUfgUfuGfuUf | 801 | GfGfaAfcUfgGfaAfcAf | 1100 |
| | | | cCfaGfuUfcCf(invdT) | | aCfaGfuGfgdTdT | |
| 0204 | 4890 | 4908 | ccaCfaCfuGfuUfgUfuCf | 802 | UfGfgAfaCfuGfgAfaCf | 1101 |
| | | | cAfgUfuCfcAf(invdT) | | aAfcAfgUfgdTdT | |
| 0205 | 4894 | 4912 | ccaGfuUfgUfuCfcAfgUf | 803 | UfGfcUfuGfgAfaCfuGf | 1102 |
| | | | uCfcAfaGfcAf(invdT) | | gAfaCfaAfcdTdT | |
| 0206 | 4896 | 4914 | ccaUfgUfuCfcAfgUfuCf | 804 | CfAfuGfcUfuGfgAfaCf | 1103 |
| | | | cAfaGfcAfuGf(invdT) | | uGfgAfaCfadTdT | |
| 0207 | 4897 | 4915 | ccaGfuUfcCfaGfuUfcCf | 805 | CfCfaUfgCfuUfgGfaAf | 1104 |
| | | | aAfgCfaUfgGf(invdT) | | cUfgGfaAfcdTdT | |
| 0208 | 4911 | 4929 | ccaCfaUfgGfaGfgCfuCf | 806 | UfUfcAfgAfaUfgAfgCf | 1105 |
| | | | aUfuCfuGfaAf(invdT) | | cUfcCfaUfgdTdT | |
| 0209 | 4912 | 4930 | ccaAfuGfgAfgGfcUfcAf | 807 | CfUfuCfaGfaAfuGfaGf | 1106 |
| | | | uUfcUfgAfaGf(invdT) | | cCfuCfcAfudTdT | |
| 0210 | 4914 | 4932 | ccaGfgAfgGfcUfcAfuUf | 808 | UfGfcUfuCfaGfaAfuGf | 1107 |
| | | | cUfgAfaGfcAf(invdT) | | aGfcCfuCfcdTdT | |
| 0211 | 4921 | 4939 | ccaCfaUfuCfuGfaAfgCf | 809 | UfUfgGfuGfcUfgCfuUf | 1108 |
| | | | aGfcAfcCfaAf(invdT) | | cAfgAfaUfgdTdT | |
| 0212 | 4927 | 4945 | ccaGfaAfgCfaGfcAfcCf | 810 | GfCfuCfaGfuUfgGfuGf | 1109 |
| | | | aAfcUfgAfgCf(invdT) | | cUfgCfuUfcdTdT | |
| 0213 | 4930 | 4948 | ccaGfcAfgCfaCfcAfaCf | 811 | UfUfuGfcUfcAfgUfuGf | 1110 |
| | | | uGfaGfcAfaAf(invdT) | | gUfgCfuGfcdTdT | |
| 0214 | 4960 | 4978 | ccaCfgGfcAfgUfgCfuAf | 812 | UfAfcCfaUfgGfuAfgCf | 1111 |
| | | | cCfaUfgGfuAf(invdT) | | aCfuGfcCfgdTdT | |
| 0215 | 4963 | 4981 | ccaCfaGfuGfcUfaCfcAf | 813 | CfAfuUfaCfcAfuGfgUf | 1112 |
| | | | uGfgUfaAfuGf(invdT) | | aGfcAfcUfgdTdT | |
| 0216 | 4965 | 4983 | ccaGfuGfcUfaCfcAfuGf | 814 | GfCfcAfuUfaCfcAfuGf | 1113 |
| | | | gUfaAfuGfgCf(invdT) | | gUfaGfcAfcdTdT | |
| 0217 | 4972 | 4990 | ccaCfaUfgGfuAfaUfgGf | 815 | AfAfcUfcUfgGfcCfaUf | 1114 |
| | | | cCfaGfaGfuUf(invdT) | | uAfcCfaUfgdTdT | |
| 0218 | 4975 | 4993 | ccaGfgUfaAfuGfgCfcAf | 816 | GfAfuAfaCfuCfuGfgCf | 1115 |
| | | | gAfgUfuAfuCf(invdT) | | cAfuUfaCfcdTdT | |
| 0219 | 4976 | 4994 | ccaGfuAfaUfgGfcCfaGf | 817 | CfGfaUfaAfcUfcUfgGf | 1116 |
| | | | aGfuUfaUfcGf(invdT) | | cCfaUfuAfcdTdT | |
| 0220 | 4977 | 4995 | ccaUfaAfuGfgCfcAfgAf | 818 | UfCfgAfuAfaCfuCfuGf | 1117 |
| | | | gUfuAfuCfgAf(invdT) | | gCfcAfuUfadTdT | |
| 0221 | 4980 | 4998 | ccaUfgGfcCfaGfaGfuUf | 819 | GfCfcUfcGfaUfaAfcUf | 1118 |
| | | | aUfcGfaGfgCf(invdT) | | cUfgGfcCfadTdT | |
| 0222 | 4981 | 4999 | ccaGfgCfcAfgAfgUfuAf | 820 | UfGfcCfuCfgAfuAfaCf | 1119 |
| | | | uCfgAfgGfcAf(invdT) | | uCfuGfgCfcdTdT | |
| 0223 | 4982 | 5000 | ccaGfcCfaGfaGfuUfaUf | 821 | GfUfgCfcUfcGfaUfaAf | 1120 |
| | | | cGfaGfgCfaCf(invdT) | | cUfcUfgGfcdTdT | |
| 0224 | 4983 | 5001 | ccaCfcAfgAfgUfuAfuCf | 822 | UfGfuGfcCfuCfgAfuAf | 1121 |
| | | | gAfgGfcAfcAf(invdT) | | aCfuCfuGfgdTdT | |
| 0225 | 4985 | 5003 | ccaAfgAfgUfuAfuCfgAf | 823 | AfAfuGfuGfcCfuCfgAf | 1122 |
| | | | gGfcAfcAfuUf(invdT) | | uAfaCfuCfudTdT | |
| 0226 | 4986 | 5004 | ccaGfaGfuUfaUfcGfaGf | 824 | GfAfaUfgUfgCfcUfcGf | 1123 |
| | | | gCfaCfaUfuCf(invdT) | | aUfaAfcUfcdTdT | |
| 0227 | 4987 | 5005 | ccaAfgUfuAfuCfgAfgGf | 825 | AfGfaAfuGfuGfcCfuCf | 1124 |
| | | | cAfcAfuUfcUf(invdT) | | gAfuAfaCfudTdT | |
| 0228 | 4997 | 5015 | ccaGfcAfcAfuUfcUfcCf | 826 | AfCfaGfuGfgUfgGfaGf | 1125 |
| | | | aCfcAfcUfgUf(invdT) | | aAfuGfuGfcdTdT | |
| 0229 | 5001 | 5019 | ccaAfuUfcUfcCfaCfcAf | 827 | UfGfuGfaCfaGfuGfgUf | 1126 |
| | | | cUfgUfcAfcAf(invdT) | | gGfaGfaAfudTdT | |
| 0230 | 5016 | 5034 | ccaCfaCfaGfgAfaGfgAf | 828 | UfUfgAfcAfuGfuCfcUf | 1127 |
| | | | CAfuGfuCfaAf(invdT) | | uCfcUfgUfgdTdT | |
| 0231 | 5021 | 5039 | ccaGfaAfgGfaCfaUfgUf | 829 | CfAfaGfaUfuGfaCfaUf | 1128 |
| | | | cAfaUfcUfuGf(invdT) | | gUfcCfuUfcdTdT | |
| 0232 | 5149 | 5167 | ccaUfuUfaCfcAfuGfgAf | 830 | UfGfcUfgGfgGfuCfcAf | 1129 |
| | | | cCfcCfaGfcAf(invdT) | | uGfgUfaAfadTdT | |
| 0233 | 5150 | 5168 | ccaUfuAfcCfaUfgGfaCf | 831 | AfUfgCfuGfgGfgUfcCf | 1130 |
| | | | cCfcAfgCfaUf(invdT) | | aUfgGfuAfadTdT | |
| 0234 | 5180 | 5198 | ccaAfcUfgCfaAfcCfuGf | 832 | CfAfuCfgCfgUfcAfgGf | 1131 |
| | | | aCfgCfgAfuGf(invdT) | | uUfgCfaGfudTdT | |
| 0235 | 5186 | 5204 | ccaAfcCfuGfaCfgCfgAf | 833 | UfCfuGfaGfcAfuCfgCf | 1132 |
| | | | uGfcUfcAfgAf(invdT) | | gUfcAfgGfudTdT | |
| 0236 | 5189 | 5207 | ccaUfgAfcGfcGfaUfgCf | 834 | GfUfgUfcUfgAfgCfaUf | 1133 |
| | | | uCfaGfaCfaCf(invdT) | | cGfcGfuCfadTdT | |
| 0237 | 5190 | 5208 | ccaGfaCfgCfgAfuGfcUf | 835 | UfGfuGfuCfuGfaGfcAf | 1134 |
| | | | cAfgAfcAfcAf(invdT) | | uCfgCfgUfcdTdT | |
| 0238 | 5191 | 5209 | ccaAfcGfcGfaUfgCfuCf | 836 | CfUfgUfgUfcUfgAfgCf | 1135 |
| | | | aGfaCfaCfaGf(invdT) | | aUfcGfcGfudTdT | |
| 0239 | 5192 | 5210 | ccaCfgCfgAfuGfcUfcAf | 837 | UfCfuGfuGfuCfuGfaGf | 1136 |
| | | | gAfcAfcAfgAf(invdT) | | cAfuCfgCfgdTdT | |
| 0240 | 5761 | 5779 | ccaGfaAfgUfgAfaCfcUf | 838 | GfAfgAfuUfcGfaGfgUf | 1137 |
| | | | cGfaAfuCfuCf(invdT) | | uCfaCfuUfcdTdT | |
| 0241 | 5922 | 5940 | ccaCfaGfgAfcUfgAfaUf | 839 | GfAfuGfuAfaCfaUfuCf | 1138 |
| | | | gUfuAfcAfuCf(invdT) | | aGfuCfcUfgdTdT | |
| 0242 | 5956 | 5974 | ccaAfcCfcAfaGfgUfaCf | 840 | UfCfcCfaAfaGfgUfaCf | 1139 |
| | | | cUfuUfgGfgAf(invdT) | | cUfuGfgGfudTdT | |
| 0243 | 5957 | 5975 | ccaCfcCfaAfgGfuAfcCf | 841 | GfUfcCfcAfaAfgGfuAf | 1140 |
| | | | uUfuGfgGfaCf(invdT) | | cCfuUfgGfgdTdT | |
| 0244 | 5964 | 5982 | ccaUfaCfcUfuUfgGfgAf | 842 | AfAfgGfcCfaGfuCfcCf | 1141 |
| | | | cUfgGfcCfuUf(invdT) | | aAfaGfgUfadTdT | |
| 0245 | 5965 | 5983 | ccaAfcCfuUfuGfgGfaCf | 843 | GfAfaGfgCfcAfgUfcCf | 1142 |
| | | | uGfgCfcUfuCf(invdT) | | cAfaAfgGfudTdT | |
| 0246 | 6323 | 6341 | ccaGfaCfaGfcAfaUfcAf | 844 | UfCfuUfcGfuUfuGfaUf | 1143 |
| | | | aAfcGfaAfgAf(invdT) | | uGfcUfgUfcdTdT | |
| 0247 | 6324 | 6342 | ccaAfcAfgCfaAfuCfaAf | 845 | GfUfcUfuCfgUfuUfgAf | 1144 |
| | | | aCfgAfaGfaCf(invdT) | | uUfgCfuGfudTdT | |
| 0248 | 6325 | 6343 | ccaCfaGfcAfaUfcAfaAf | 846 | UfGfuCfuUfcGfuUfuGf | 1145 |
| | | | cGfaAfgAfcAf(invdT) | | aUfuGfcUfgdTdT | |
| 0249 | 6326 | 6344 | ccaAfgCfaAfuCfaAfaCf | 847 | GfUfgUfcUfuCfgUfuUf | 1146 |
| | | | gAfaGfaCfaCf(invdT) | | gAfuUfgCfudTdT | |
| 0250 | 6327 | 6345 | ccaGfcAfaUfcAfaAfcGf | 848 | AfGfuGfuCfuUfcGfuUf | 1147 |
| | | | aAfgAfcAfcUf(invdT) | | uGfaUfuGfcdTdT | |
| 0251 | 6328 | 6346 | ccaCfaAfuCfaAfaCfgAf | 849 | CfAfgUfgUfcUfuCfgUf | 1148 |
| | | | aGfaCfaCfuGf(invdT) | | uUfgAfuUfgdTdT | |
| 0252 | 6330 | 6348 | ccaAfuCfaAfaCfgAfaGf | 850 | AfAfcAfgUfgUfcUfuCf | 1149 |
| | | | aCfaCfuGfuUf(invdT) | | gUfuUfgAfudTdT | |
| 0253 | 6331 | 6349 | ccaUfcAfaAfcGfaAfgAf | 851 | GfAfaCfaGfuGfuCfuUf | 1150 |
| | | | cAfcUfgUfuCf(invdT) | | cGfuUfuGfadTdT | |
| 0254 | 6332 | 6350 | ccaCfaAfaCfgAfaGfaCf | 852 | GfGfaAfcAfgUfgUfcUf | 1151 |
| | | | aCfuGfuUfcCf(invdT) | | uCfgUfuUfgdTdT | |
| 0255 | 6333 | 6351 | ccaAfaAfcGfaAfgAfcAf | 853 | GfGfgAfaCfaGfuGfuCf | 1152 |
| | | | cUfgUfuCfcCf(invdT) | | uUfcGfuUfudTdT | |
| 0256 | 6334 | 6352 | ccaAfaCfgAfaGfaCfaCf | 854 | UfGfgGfaAfcAfgUfgUf | 1153 |
| | | | uGfuUfcCfcAf(invdT) | | cUfuCfgUfudTdT | |
| 0257 | 6335 | 6353 | ccaAfcGfaAfgAfcAfcUf | 855 | CfUfgGfgAfaCfaGfuGf | 1154 |
| | | | gUfuCfcCfaGf(invdT) | | uCfuUfcGfudTdT | |
| 0258 | 6336 | 6354 | ccaCfgAfaGfaCfaCfuGf | 856 | GfCfuGfgGfaAfcAfgUf | 1155 |
| | | | uUfcCfcAfgCf(invdT) | | gUfcUfuCfgdTdT | |
| 0259 | 6337 | 6355 | ccaGfaAfgAfcAfcUfgUf | 857 | AfGfcUfgGfgAfaCfaGf | 1156 |
| | | | uCfcCfaGfcUf(invdT) | | uGfuCfuUfcdTdT | |
| 0260 | 6338 | 6356 | ccaAfaGfaCfaCfuGfuUf | 858 | UfAfgCfuGfgGfaAfcAf | 1157 |
| | | | cCfcAfgCfuAf(invdT) | | gUfgUfcUfudTdT | |
| 0261 | 6339 | 6357 | ccaAfgAfcAfcUfgUfuCf | 859 | GfUfaGfcUfgGfgAfaCf | 1158 |
| | | | cCfaGfcUfaCf(invdT) | | aGfuGfuCfudTdT | |
| 0262 | 6340 | 6358 | ccaGfaCfaCfuGfuUfcCf | 860 | GfGfuAfgCfuGfgGfaAf | 1159 |
| | | | cAfgCfuAfcCf(invdT) | | cAfgUfgUfcdTdT | |
| 0263 | 6341 | 6359 | ccaAfcAfcUfgUfuCfcCf | 861 | UfGfgUfaGfcUfgGfgAf | 1160 |
| | | | aGfcUfaCfcAf(invdT) | | aCfaGfuGfudTdT | |
| 0264 | 6350 | 6368 | ccaCfcAfgCfuAfcCfaGf | 862 | UfGfgCfaUfaGfcUfgGf | 1161 |
| | | | cUfaUfgCfcAf(invdT) | | uAfgCfuGfgdTdT | |
| 0265 | 6351 | 6369 | ccaCfaGfcUfaCfcAfgCf | 863 | UfUfgGfcAfuAfgCfuGf | 1162 |
| | | | uAfuGfcCfaAf(invdT) | | gUfaGfcUfgdTdT | |
| 0266 | 6352 | 6370 | ccaAfgCfuAfcCfaGfcUf | 864 | UfUfuGfgCfaUfaGfcUf | 1163 |
| | | | aUfgCfcAfaAf(invdT) | | gGfuAfgCfudTdT | |
| 0267 | 6353 | 6371 | ccaGfcUfaCfcAfgCfuAf | 865 | GfUfuUfgGfcAfuAfgCf | 1164 |
| | | | uGfcCfaAfaCf(invdT) | | uGfgUfaGfcdTdT | |
| 0268 | 6354 | 6372 | ccaCfuAfcCfaGfcUfaUf | 866 | GfGfuUfuGfgCfaUfaGf | 1165 |
| | | | gCfcAfaAfcCf(invdT) | | cUfgGfuAfgdTdT | |
| 0269 | 6355 | 6373 | ccaUfaCfcAfgCfuAfuGf | 867 | AfGfgUfuUfgGfcAfuAf | 1166 |
| | | | cCfaAfaCfcUf(invdT) | | gCfuGfgUfadTdT | |
| 0270 | 6376 | 6394 | ccaGfcAfuUfuUfuGfgUf | 868 | AfCfaAfaAfaUfaCfcAf | 1167 |
| | | | aUfuUfuUfgUf(invdT) | | aAfaAfuGfcdTdT | |
| 0271 | 6377 | 6395 | ccaCfaUfuUfuUfgGfuAf | 869 | CfAfcAfaAfaAfuAfcCf | 1168 |
| | | | uUfuUfuGfuGf(invdT) | | aAfaAfaUfgdTdT | |
| 0272 | 6378 | 6396 | ccaAfuUfuUfuGfgUfaUf | 870 | AfCfaCfaAfaAfaUfaCf | 1169 |
| | | | uUfuUfgUfgUf(invdT) | | cAfaAfaAfudTdT | |
| 0273 | 6379 | 6397 | ccaUfuUfuUfgGfuAfuUf | 871 | UfAfcAfcAfaAfaAfuAf | 1170 |
| | | | uUfuGfuGfuAf(invdT) | | cCfaAfaAfadTdT | |
| 0274 | 6380 | 6398 | ccaUfuUfuGfgUfaUfuUf | 872 | AfUfaCfaCfaAfaAfaUf | 1171 |
| | | | uUfgUfgUfaUf(invdT) | | aCfcAfaAfadTdT | |
| 0275 | 6381 | 6399 | ccaUfuUfgGfuAfuUfuUf | 873 | UfAfuAfcAfcAfaAfaAf | 1172 |
| | | | uGfuGfuAfuAf(invdT) | | uAfcCfaAfadTdT | |
| 0276 | 6382 | 6400 | ccaUfuGfgUfaUfuUfuUf | 874 | UfUfaUfaCfaCfaAfaAf | 1173 |
| | | | gUfgUfaUfaAf(invdT) | | aUfaCfcAfadTdT | |
| 0277 | 6383 | 6401 | ccaUfgGfuAfuUfuUfuGf | 875 | CfUfuAfuAfcAfcAfaAf | 1174 |
| | | | uGfuAfuAfaGf(invdT) | | aAfuAfcCfadTdT | |
| 0278 | 6384 | 6402 | ccaGfgUfaUfuUfuUfgUf | 876 | GfCfuUfaUfaCfaCfaAf | 1175 |
| | | | gUfaUfaAfgCf(invdT) | | aAfaUfaCfcdTdT | |
| 0279 | 6385 | 6403 | ccaGfuAfuUfuUfuGfuGf | 877 | AfGfcUfuAfuAfcAfcAf | 1176 |
| | | | uAfuAfaGfcUf(invdT) | | aAfaAfuAfcdTdT | |
| 0280 | 6386 | 6404 | ccaUfaUfuUfuUfgUfgUf | 878 | AfAfgCfuUfaUfaCfaCf | 1177 |
| | | | aUfaAfgCfuUf(invdT) | | aAfaAfaUfadTdT | |
| 0281 | 6387 | 6405 | ccaAfuUfuUfuGfuGfuAf | 879 | AfAfaGfcUfuAfuAfcAf | 1178 |
| | | | uAfaGfcUfuUf(invdT) | | cAfaAfaAfudTdT | |
| 0282 | 6388 | 6406 | ccaUfuUfuUfgUfgUfaUf | 880 | AfAfaAfgCfuUfaUfaCf | 1179 |
| | | | aAfgCfuUfuUf(invdT) | | aCfaAfaAfadTdT | |
| 0283 | 6455 | 6473 | ccaUfgUfuAfaAfaAfuAf | 881 | GfCfaGfaGfuUfuAfuUf | 1180 |
| | | | aAfcUfcUfgCf(invdT) | | uUfuAfaCfadTdT | |
| 0284 | 6456 | 6474 | ccaGfuUfaAfaAfaUfaAf | 882 | UfGfcAfgAfgUfuUfaUf | 1181 |
| | | | aCfuCfuGfcAf(invdT) | | uUfuUfaAfcdTdT | |
| 0285 | 6457 | 6475 | ccaUfuAfaAfaAfuAfaAf | 883 | GfUfgCfaGfaGfuUfuAf | 1182 |
| | | | cUfcUfgCfaCf(invdT) | | uUfuUfuAfadTdT | |
| 0286 | 6458 | 6476 | ccaUfaAfaAfaUfaAfaCf | 884 | AfGfuGfcAfgAfgUfuUf | 1183 |
| | | | uCfuGfcAfcUf(invdT) | | aUfuUfuUfadTdT | |
| 0287 | 6459 | 6477 | ccaAfaAfaAfuAfaAfcUf | 885 | AfAfgUfgCfaGfaGfuUf | 1184 |
| | | | cUfgCfaCfuUf(invdT) | | uAfuUfuUfudTdT | |
| 0288 | 6460 | 6478 | ccaAfaAfaUfaAfaCfuCf | 886 | UfAfaGfuGfcAfgAfgUf | 1185 |
| | | | uGfcAfcUfuAf(invdT) | | uUfaUfuUfudTdT | |
| 0289 | 6461 | 6479 | ccaAfaAfuAfaAfcUfcUf | 887 | AfUfaAfgUfgCfaGfaGf | 1186 |
| | | | gCfaCfuUfaUf(invdT) | | uUfuAfuUfudTdT | |
| 0290 | 6462 | 6480 | ccaAfaUfaAfaCfuCfuGf | 888 | AfAfuAfaGfuGfcAfgAf | 1187 |
| | | | cAfcUfuAfuUf(invdT) | | gUfuUfaUfudTdT | |
| 0291 | 6463 | 6481 | ccaAfuAfaAfcUfcUfgCf | 889 | AfAfaUfaAfgUfgCfaGf | 1188 |
| | | | aCfuUfaUfuUf(invdT) | | aGfuUfuAfudTdT | |
| 0292 | 6464 | 6482 | ccaUfaAfaCfuCfuGfcAf | 890 | AfAfaAfuAfaGfuGfcAf | 1189 |
| | | | cUfuAfuUfuUf(invdT) | | gAfgUfuUfadTdT | |
| 0293 | 6465 | 6483 | ccaAfaAfcUfcUfgCfaCf | 891 | CfAfaAfaUfaAfgUfgCf | 1190 |
| | | | uUfaUfuUfuGf(invdT) | | aGfaGfuUfudTdT | |
| 0294 | 6466 | 6484 | ccaAfaCfuCfuGfcAfcUf | 892 | UfCfaAfaAfuAfaGfuGf | 1191 |
| | | | uAfuUfuUfgAf(invdT) | | cAfgAfgUfudTdT | |
| 0295 | 6467 | 6485 | ccaAfcUfcUfgCfaCfuUf | 893 | AfUfcAfaAfaUfaAfgUf | 1192 |
| | | | aUfuUfuGfaUf(invdT) | | gCfaGfaGfudTdT | |
| 0296 | 6468 | 6486 | ccaCfuCfuGfcAfcUfuAf | 894 | AfAfuCfaAfaAfuAfaGf | 1193 |
| | | | uUfuUfgAfuUf(invdT) | | uGfcAfgAfgdTdT | |
| 0297 | 6469 | 6487 | ccaUfcUfgCfaCfuUfaUf | 895 | AfAfaUfcAfaAfaUfaAf | 1194 |
| | | | uUfuGfaUfuUf(invdT) | | gUfgCfaGfadTdT | |
| 0298 | 6470 | 6488 | ccaCfuGfcAfcUfuAfuUf | 896 | CfAfaAfuCfaAfaAfuAf | 1195 |
| | | | uUfgAfuUfuGf(invdT) | | aGfuGfcAfgdTdT | |
| 0299 | 6471 | 6489 | ccaUfgCfaCfuUfaUfuUf | 897 | UfCfaAfaUfcAfaAfaUf | 1196 |
| | | | uGfaUfuUfgAf(invdT) | | aAfgUfgCfadTdT | |

[0146] In some embodiments, the dsRNA comprises one or more modified nucleotides described in PCT Publication WO 2019/170731, the disclosure of which is incorporated herein in its entirety. In such modified nucleotides, the ribose ring has been replaced by a six-membered heterocyclic ring. Such a modified nucleotide has the structure of formula (I):

[chemical structure]

wherein:
[0147] B is a heterocyclic nucleobase;
[0148] one of L1 and L2 is an internucleoside linking group linking the compound of formula (I) to a polynucleotide and the other of L1 and L2 is H, a protecting group, a phosphorus moiety or an internucleoside linking group linking the compound of formula (I) to a polynucleotide,
[0149] Y is O, NH, NR1 or N—C(═O)—R1, wherein R1 is:
[0150] a (C1-C20) alkyl group, optionally substituted by one or more groups selected from an halogen atom, a (C1-C6) alkyl group, a (C3-C8) cycloalkyl group, a (C3-C14) heterocycle, a (C6-C14) aryl group, a (C5-C14) heteroaryl group, —O—Z1, —N(Z1)(Z2), —S—Z1, —CN, —C(=J)-O—Z1, —O—C(=J)-Z1, —C(=J)-N(Z1)(Z2), and —N(Z1)-C(=J)-Z2, wherein

### J is O or S,

[0151] each of Z1 and Z2 is, independently, H, a (C1-C6) alkyl group, optionally substituted by one or more groups selected from a halogen atom and a (C1-C6) alkyl group,
a (C3-C8) cycloalkyl group, optionally substituted by one or more groups selected from a halogen atom and a (C1-C6) alkyl group,
a group —[C(═O)]m-R2-(O—CH₂—CH₂)p-R3, wherein
m is an integer meaning 0 or 1,
p is an integer ranging from 0 to 10,
R2 is a (C1-C20) alkylene group optionally substituted by a (C1-C6) alkyl group, —O—Z3, —N(Z3)(Z4), —S—Z3, —CN, —C(═K)—O—Z3, —O—C(═K)—Z3, —C(═K)—N(Z3)(Z4), or —N(Z3)-C(═K)—Z4, wherein

### K is O or S,

[0152] each of Z3 and Z4 is, independently, H, a (C1-C6) alkyl group, optionally substituted by one or more groups selected from a halogen atom and a (C1-C6) alkyl group, and
R3 is selected from the group consisting of a hydrogen atom, a (C1-C6) alkyl group, a (C1-C6) alkoxy group, a (C3-C8) cycloalkyl group, a (C3-C14) heterocycle, a (C6-C14) aryl group or a (C5-C14) heteroaryl group, or R3 is a cell targeting moiety,
[0153] X1 and X2 are each, independently, a hydrogen atom, a (C1-C6) alkyl group, and
[0154] each of Ra, Rb, Rc and Rd is, independently, H or a (C1-C6) alkyl group,
   or is a pharmaceutically acceptable salt thereof.

[0155] In some embodiments, Y is NR1, R1 is a non-substituted (C1-C20) alkyl group, and L1, L2, Ra, Rb, Rc, Rd, X1, X2, R2, R3 and B have the same meaning as defined for the general formula (I), or a pharmaceutically acceptable salt thereof.

[0156] In some embodiments, Y is NR1, R1 is a non-substituted (C1-C16) alkyl group, which includes an alkyl group selected from a group comprising methyl, isopropyl, butyl, octyl, hexadecyl, and L1, L2, Ra, Rb, Rc, Rd, X1, X2, R2, R3 and B have the same meaning as defined for the general formula (I), or a pharmaceutically acceptable salt thereof.

[0157] In some embodiments, Y is NR1, R1 is a (C3-C8) cycloalkyl group, optionally substituted by one or more groups selected from a halogen atom and a (C1-C6) alkyl group, and L1, L2, Ra, Rb, Rc, Rd, X1, X2, R2, R3 and B have the same meaning as defined for the general formula (I), or a pharmaceutically acceptable salt thereof.

[0158] In some embodiments, Y is NR1, R1 is a cyclohexyl group, and L1, L2, Ra, Rb, Rc, Rd, X1, X2, R2, R3 and B have the same meaning as defined for the general formula (I), or a pharmaceutically acceptable salt thereof.

[0159] In some embodiments, Y is NR1, R1 is a (C1-C20) alkyl group substituted by a (C6-C14) aryl group and L1, L2, Ra, Rb, Rc, Rd, X1, X2, R2, R3 and B have the same meaning as defined for the general formula (I), or a pharmaceutically acceptable salt thereof.

[0160] In some embodiments, Y is NR1, R1 is a methyl group substituted by a phenyl group, and L1, L2, Ra, Rb, Rc, Rd, X1, X2, R2, R3 and B have the same meaning as defined for the general formula (I), or a pharmaceutically acceptable salt thereof.

[0161] In some embodiments, Y is N—C(═O)—R1, R1 is an optionally substituted (C1-C20) alkyl group, and L1, L2, Ra, Rb, Rc, Rd, X1, X2, R2, R3 and B have the same meaning as defined for the general formula (I), or a pharmaceutically acceptable salt thereof.

[0162] In some embodiments, Y is N—C(═O)—R1, R1 is selected from a group comprising methyl and pentadecyl and L1, L2, Ra, Rb, Rc, Rd, X1, X2, R2, R3 and B have the same meaning as defined for the general formula (I), or a pharmaceutically acceptable salt thereof.

[0163] In some embodiments, the dsRNA comprises one or more compounds of formula (I) wherein Y is
[0164] a) NR1, wherein R1 is a non-substituted (C1-C20) alkyl group;
[0165] b) NR1, wherein R1 is a non-substituted (C1-C16) alkyl group, which includes an alkyl group selected from a group comprising methyl, isopropyl, butyl, octyl, and hexadecyl;
[0166] c) NR1, wherein R1 is a (C3-C8) cycloalkyl group, optionally substituted by one or more groups selected from a halogen atom and a (C1-C6) alkyl group;
[0167] d) NR1, wherein R1 is a cyclohexyl group;
[0168] e) NR1, wherein R1 is a (C1-C20) alkyl group substituted by a (C6-C14) aryl group;
[0169] f) NR1, wherein R1 is a methyl group substituted by a phenyl group;
[0170] g) N—C(═O)—R1, wherein R1 is an optionally substituted (C1-C20) alkyl group; or
[0171] h) N—C(═O)—R1, wherein R1 is methyl or pentadecyl.

[0172] In some embodiments, B is selected from a group comprising a pyrimidine, a substituted pyrimidine, a purine and a substituted purine, or a pharmaceutically acceptable salt thereof.

[0173] In some embodiments, the internucleoside linking group in the dsRNA is independently selected from the group consisting of phosphodiester, phosphotriester, phosphorothioate, phosphorodithioate, alkyl-phosphonate and phosphoramidate backbone linking groups, or a pharmaceutically acceptable salt thereof. In some embodiments, the dsRNA comprises one or more internucleoside linking groups independently selected from the group consisting of phosphodiester, phosphotriester, phosphorothioate, phosphorodithioate, alkyl-phosphonate and phosphoramidate backbone linking groups, or a pharmaceutically acceptable salt thereof.

[0174] In some embodiments, the dsRNA comprises from 2 to 10 compounds of formula (I), or a pharmaceutically acceptable salt thereof. In a particular embodiment, the 2 to 10 compounds of formula (I) are on the sense strand.

[0175] In further embodiments, the dsRNA comprises one or more targeted nucleotides or a pharmaceutically acceptable salt thereof.

[0176] In some embodiments, R3 is of the formula (II):

[chemical structure]

wherein A1, A2 and A3 are OH,
A4 is OH or NHC(═O)—R5, wherein R5 is a (C1-C6) alkyl group, optionally substituted by a halogen atom. or a pharmaceutically acceptable salt thereof

[0177] In some embodiments, R3 is N-acetyl-galactosamine, or a pharmaceutically acceptable salt thereof The precursors that can be used to make modified siRNAs having nucleotides of

[0178] formula (I) are exemplified in Table A below. Table A shows examples of phosphoramidite nucleotide analogs for oligonucleotide synthesis. In the (2S,6R) diastereomeric series, the phosphoramidites as nucleotide precursors are abbreviated with a “pre-1”, the nucleotide analogs are abbreviated with an “l”, followed by the nucleobase and a number, which specifies the group Y in formula (I). To distinguish both stereochemistries, the analogues (2R,6R)-diastereoisomers are indicated with an additional “b.” Targeted nucleotide precursors, targeted nucleotide analogs and solid supports are abbreviated as described above, but with an “lg” instead of the “l.”

TABLE A

| | | | Name in | |
|---|---|---|---|---|
| | | Precursor | oligo- | |
| No | Structure | name | sequence | Stereochemistry |
| 1 | [chemical structure] | pre-lT3 | lT3 | (2S,6R) |
| 2 | [chemical structure] | pre-lU3 | lU3 | (2S,6R) |
| 3 | [chemical structure] | pre-lG3 | lG3 | (2S,6R) |
| 4 | [chemical structure] | pre-lA3 | lA3 | (2S,6R) |
| 5 | [chemical structure] | pre-lC3 | lC3 | (2S,6R) |
| 6 | [chemical structure] | pre-lT3b | lT3b | (2R,6R) |
| 7 | [chemical structure] | pre-lU3b | lU3b | (2R,6R) |
| 8 | [chemical structure] | pre-lG3b | lG3b | (2R,6R) |
| 9 | [chemical structure] | pre-lA3b | lA3b | (2R,6R) |
| 10 | [chemical structure] | pre-lC3b | lC3b | (2R,6R) |
| 11 | [chemical structure] | pre-lT2 | lT2 | (2S,6R) |
| 12 | [chemical structure] | pre-lT6 | lT6 | (2S,6R) |
| 13 | [chemical structure] | pre-lT7 | lT7 | (2S,6R) |
| 14 | [chemical structure] | pre-lT8 | lT8 | (2S,6R) |
| 15 | [chemical structure] | pre-lT4 | lT4 | (2S,6R) |
| 16 | [chemical structure] | pre-lT5 | lT5 | (2S,6R) |
| 17 | [chemical structure] | pre-lT9 | lT9 | (2S,6R) |
| 18 | [chemical structure] | pre-lT10 | lT10 | (2S,6R) |
| 19 | [chemical structure] | pre-lT1 | lT1 | (2S,6R) |
| 20 | [chemical structure] | pre-lU1 | lU1 | (2S,6R) |
| 21 | [chemical structure] | pre-lG1 | lG1 | (2S,6R) |
| 22 | [chemical structure] | pre-lC1 | lC1 | (2S,6R) |
| 23 | [chemical structure] | pre-lT1b | lT1b | (2R,6R) |
| 24 | [chemical structure] | pre-lU1b | lU1b | (2R,6R) |
| 25 | [chemical structure] | pre-lC1b | lC1b | (2R,6R) |
| 26 | [chemical structure] | pre-lgT9 | lgT9 | (2S,6R) |
| 27 | [chemical structure] | pre-lgT8 | lgT8 | (2S,6R) |
| 28 | [chemical structure] | pre-lgT7 | lgT7 | (2S,6R) |
| 29 | [chemical structure] | pre-lgT6 | lgT6 | (2S,6R) |
| 30 | [chemical structure] | pre-lgT5 | lgT5 | (2S,6R) |
| 31 | [chemical structure] | pre-lgT3 | lgT3 | (2S,6R) |
| 32 | [chemical structure] | pre-lgT4 | lgT4 | (2S,6R) |
| 33 | [chemical structure] | pre-lgT12 | lgT12 | (2S,6R) |
| 34 | [chemical structure] | pre-lgT11 | lgT11 | (2S,6R) |
| 35 | [chemical structure] | pre-lgT10 | lgT10 | (2S,6R) |
| 36 | [chemical structure] | pre-lgT1 | lgT1 | (2S,6R) |
| 37 | [chemical structure] | pre-lgT2 | lgT2 | (2S,6R) |
| 38 | [chemical structure] | pre-lU4 | lU4 | (2S,6R) |
| 39 | [chemical structure] | pre-lG4 | lG4 | (2S,6R) |
| 40 | [chemical structure] | pre-lA4 | lA4 | (2S,6R) |
| 41 | [chemical structure] | pre-lC4 | lC4 | (2S,6R) |
| 42 | [chemical structure] | pre-lA4b | lA4b | (2R,6R) |
| 43 | [chemical structure] | pre-lA1 | lA1 | (2S,6R) |
| 44 | [chemical structure] | pre-lA1b | lA1b | (2R,6R) |
| 45 | [chemical structure] | pre-lT4b | lT4b | (2R,6R) |
| 46 | [chemical structure] | pre-lG1b | lG1b | (2R,6R) |

[0179] The modified nucleotides of formula (I) may be incorporated at the 5′, 3′, or both ends of the sense strand and/or antisense strand of the dsRNA. By way of example, one or more (e.g., 1, 2, 3, 4, or 5 or more) modified nucleotides may be incorporated at the 5′ end of the sense strand of the dsRNA. In some embodiments, one or more (e.g., 1, 2, 3, or more) modified nucleotides are positioned in the 5′ end of the sense strand, where the modified nucleotides do not complement the antisense sequence but may be optionally paired with an equal or smaller number of complementary nucleotides at the corresponding 3′ end of the antisense strand. In a particular embodiment, the sense strand comprises two to five compounds of formula (I) at the 5′ end, and/or comprises one to three compounds of formula (I) at the 3′ end.

[0180] In some embodiments,
[0181] a) the two to five compounds of formula (I) at the 5′ end of the sense strand comprise lgT3, optionally comprising three consecutive lgT3 nucleotides; and/or
[0182] b) the one to three compounds of formula (I) at the 3′ end of the sense strand comprise lT4; optionally comprising two consecutive lT4.

[0183] In some embodiments, the dsRNA may comprise a sense strand having a sense sequence of 17, 18, or 19 nucleotides in length, where three to five nucleotides of formula (I) (e.g., three consecutive lgT3 or lgT7 with or without additional nucleotides of formula (I)) are placed in the 5′ end of the sense sequence, making the sense strand 20, 21, or 22 nucleotides in length. In such embodiments, the sense strand may additionally comprise two consecutive nucleotides of formula (I) (e.g., 1T4 or lT3) at the 3′ of the sense sequence, making the sense strand 22, 23, or 24 nucleotides in length. The dsRNA may comprise an antisense sequence of 19 nucleotides in length, where the antisense sequence may additionally be linked to 2 modified nucleotides or deoxyribonucleotides (e.g., dT) at its 3′ end, making the antisense strand 21 nucleotides in length. In further embodiments, the sense strand of the dsRNA contains only naturally occurring internucleotide bonds (phosphodiester bond), where the antisense strand may optionally contain non-naturally occurring internucleotide bonds. For example, the antisense strand may contain phosphorothioate bonds in the backbone near or at its 5′ and/or 3′ ends.

[0184] In some embodiments, the use of modified nucleotides of formula (I) circumvents the need for other RNA modifications such as the use of non-naturally occurring internucleotide bonds, thereby simplifying the chemical synthesis of dsRNAs. Moreover, the modified nucleotides of formula (I) can be readily made to contain cell targeted moieties such as GalNAc derivatives (which include GalNAc itself), enhancing the delivery efficiency of dsRNAs incorporating such nucleotides. Further, it has been shown that dsRNAs incorporating modified nucleotides of formula (I), e.g., at the sense strand, significantly improve the stability and therapeutic potency of the dsRNAs.

[0185] Table 3 below lists the sequences of exemplary modified GalNAc-siRNA constructs derived from selected siRNA constructs listed in Table 2. In the table, mX=2′-O-Me nucleotide; fX=2′-F nucleotide; dX=DNA nucleotide; PO=phosphodiester linkage; PS=phosphorothioate bond. In these constructs, the sequences of their sense strands and antisense strands correspond to the sense and antisense sequences of the constructs in Table 1 with the same construct numbers, but for the inclusion of (1) the modified 2′-O-Me nucleotides and 2′-F nucleotides, (2) 3 lgT3 nucleotides at the 5′ end of the sense strand sequence, and (3) phosphorothioate bonds.

TABLE 3
Exemplary LPA GalNAc-siRNA Constructs

| siLPA | Parent | Sense strand sequence | | Antisense strand sequence | |
|---|---|---|---|---|---|
| # | CNST# | (5′-3′) | SEQ | (5′-3′) | SEQ |
| 300 | 4 | lgT3-PO-lgT3-PO-lgT3-PO- | 1197 | fA-PS-fC-PS-mG-PO- | 1214 |
| | | fC-PO-mA-PO-fG-PO-mA-PO- | | fU-PO-mG-PO-fC-PO- | |
| | | fG-PO-mU-PO-fU-PO-mA-PO- | | mC-PO-fU-PO-mC-PO- | |
| | | fU-PO-mC-PO-fG-PO-mA-PO- | | fG-PO-mA-PO-fU-PO- | |
| | | fG-PO-mG-PO-fC-PO-mA-PO- | | mA-PO-fA-PO-mC-PO- | |
| | | fC-PS-mG-PS-fU | | fU-PO-mC-PO-fU-PO- | |
| | | | | mG-PS-dT-PS-dT | |
| 301 | 7 | lgT3-PO-lgT3-PO-lgT3-PO- | 1198 | fA-PS-fG-PS-mU-PO- | 1215 |
| | | fA-PO-mG-PO-fU-PO-mU-PO- | | fA-PO-mC-PO-fG-PO- | |
| | | fA-PO-mU-PO-fC-PO-mG-PO- | | mU-PO-fG-PO-mC-PO- | |
| | | fA-PO-mG-PO-fG-PO-mC-PO- | | fC-PO-mU-PO-fC-PO- | |
| | | fA-PO-mC-PO-fG-PO-mU-PO- | | mG-PO-fA-PO-mU-PO- | |
| | | fA-PS-mC-PS-fU | | fA-PO-mA-PO-fC-PO- | |
| | | | | mU-PS-dT-PS-dT | |
| 302 | 19 | lgT3-PO-lgT3-PO-lgT3-PO- | 1199 | fU-PS-fA-PS-mG-PO- | 1216 |
| | | fA-PO-mU-PO-fA-PO-mG-PO- | | fU-PO-mU-PO-fU-PO- | |
| | | fG-PO-mA-PO-fC-PO-mC-PO- | | mU-PO-fC-PO-mU-PO- | |
| | | fA-PO-mC-PO-fA-PO-mG-PO- | | fG-PO-mU-PO-fG-PO- | |
| | | fA-PO-mA-PO-fA-PO-mA-PO- | | mG-PO-fU-PO-mC-PO- | |
| | | fC-PS-mU-PS-fA | | fC-PO-mU-PO-fA-PO- | |
| | | | | mU-PS-dT-PS-dT | |
| 303 | 90 | lgT3-PO-lgT3-PO-lgT3-PO- | 1200 | fA-PS-fU-PS-mA-PO- | 1217 |
| | | fC-PO-mG-PO-fG-PO-mU-PO- | | fA-PO-mC-PO-fU-PO- | |
| | | fA-PO-mA-PO-fU-PO-mG-PO- | | mC-PO-fU-PO-mG-PO- | |
| | | fG-PO-mA-PO-fC-PO-mA-PO- | | fU-PO-mC-PO-fC-PO- | |
| | | fG-PO-mA-PO-fG-PO-mU-PO- | | mA-PO-fU-PO-mU-PO- | |
| | | fU-PS-mA-PS-fU | | fA-PO-mC-PO-fC-PO- | |
| | | | | mG-PS-dT-PS-dT | |
| 304 | 104 | lgT3-PO-lgT3-PO-lgT3-PO- | 1201 | fA-PS-fU-PS-mA-PO- | 1218 |
| | | fC-PO-mG-PO-fG-PO-mA-PO- | | fA-PO-mC-PO-fU-PO- | |
| | | fA-PO-mA-PO-fU-PO-mG-PO- | | mC-PO-fU-PO-mG-PO- | |
| | | fG-PO-mA-PO-fC-PO-mA-PO- | | fU-PO-mC-PO-fC-PO- | |
| | | fG-PO-mA-PO-fG-PO-mU-PO- | | mA-PO-fU-PO-mU-PO- | |
| | | fU-PS-mA-PS-fU | | fU-PO-mC-PO-fC-PO- | |
| | | | | mG-PS-dT-PS-dT | |
| 305 | 107 | lgT3-PO-lgT3-PO-lgT3-PO- | 1202 | fU-PS-fG-PS-mC-PO- | 1219 |
| | | fG-PO-mG-PO-fA-PO-mC-PO- | | fC-PO-mU-PO-fU-PO- | |
| | | fA-PO-mG-PO-fA-PO-mG-PO- | | mG-PO-LA-PO-mU-PO- | |
| | | fU-PO-mU-PO-fA-PO-mU-PO- | | fA-PO-mA-PO-fC-PO- | |
| | | fC-PO-mA-PO-fA-PO-mG-PO- | | mU-PO-fC-PO-mU-PO- | |
| | | fG-PS-mC-PS-fA | | fG-PO-mU-PO-fC-PO- | |
| | | | | mC-PS-dT-PS-dT | |
| 306 | 108 | lgT3-PO-lgT3-PO-lgT3-PO- | 1203 | fG-PS-fU-PS-mG-PO- | 1220 |
| | | fG-PO-mA-PO-fC-PO-mA-PO- | | fC-PO-mC-PO-fU-PO- | |
| | | fG-PO-mA-PO-fG-PO-mU-PO- | | mU-PO-fG-PO-mA-PO- | |
| | | fU-PO-mA-PO-fU-PO-mC-PO- | | fU-PO-mA-PO-fA-PO- | |
| | | fA-PO-mA-PO-fG-PO-mG-PO- | | mC-PO-fU-PO-mC-PO- | |
| | | fC-PS-mA-PS-fC | | fU-PO-mG-PO-fU-PO- | |
| | | | | mC-PS-dT-PS-dT | |
| 307 | 110 | lgT3-PO-lgT3-PO-lgT3-PO- | 1204 | fG-PS-fU-PS-mA-PO- | 1221 |
| | | fG-PO-mA-PO-fG-PO-mU-PO- | | fU-PO-mG-PO-fU-PO- | |
| | | fU-PO-mA-PO-fU-PO-mC-PO- | | mG-PO-fC-PO-mC-PO- | |
| | | fA-PO-mA-PO-fG-PO-mG-PO- | | fU-PO-mU-PO-fG-PO- | |
| | | fC-PO-mA-PO-fC-PO-mA-PO- | | mA-PO-fU-PO-mA-PO- | |
| | | fU-PS-mA-PS-fC | | fA-PO-mC-PO-fU-PO- | |
| | | | | mC-PS-dT-PS-dT | |
| 308 | 111 | lgT3-PO-lgT3-PO-lgT3-PO- | 1205 | fA-PS-fG-PS-mU-PO- | 1222 |
| | | fA-PO-mG-PO-fU-PO-mU-PO- | | fA-PO-mU-PO-fG-PO- | |
| | | fA-PO-mU-PO-fC-PO-mA-PO- | | mU-PO-fG-PO-mC-PO- | |
| | | fA-PO-mG-PO-fG-PO-mC-PO- | | fC-PO-mU-PO-fU-PO- | |
| | | fA-PO-mC-PO-LA-PO-mU-PO- | | mG-PO-fA-PO-mU-PO- | |
| | | fA-PS-mC-PS-fU | | fA-PO-mA-PO-fC-PO- | |
| | | | | mU-PS-dT-PS-dT | |
| 309 | 168 | lgT3-PO-lgT3-PO-lgT3-PO- | 1206 | fU-PS-fC-PS-mG-PO- | 1223 |
| | | fU-PO-mG-PO-fA-PO-mU-PO- | | fA-PO-mU-PO-fA-PO- | |
| | | fG-PO-mG-PO-LA-PO-mC-PO- | | mA-PO-fC-PO-mU-PO- | |
| | | fG-PO-mG-PO-LA-PO-mG-PO- | | fC-PO-mC-PO-fG-PO- | |
| | | fU-PO-mU-PO-fA-PO-mU-PO- | | mU-PO-fC-PO-mC-PO- | |
| | | fC-PS-mG-PS-fA | | fA-PO-mU-PO-fC-PO- | |
| | | | | mA-PS-dT-PS-dT | |
| 310 | 169 | lgT3-PO-lgT3-PO-lgT3-PO- | 1207 | fC-PS-fU-PS-mC-PO- | 1224 |
| | | fG-PO-mA-PO-fU-PO-mG-PO- | | fG-PO-mA-PO-fU-PO- | |
| | | fG-PO-mA-PO-fC-PO-mG-PO- | | mA-PO-fA-PO-mC-PO- | |
| | | fG-PO-mA-PO-fG-PO-mU-PO- | | fU-PO-mC-PO-fC-PO- | |
| | | fU-PO-mA-PO-fU-PO-mC-PO- | | mG-PO-fU-PO-mC-PO- | |
| | | fG-PS-mA-PS-fG | | fC-PO-mA-PO-fU-PO- | |
| | | | | mC-PS-dT-PS-dT | |
| 311 | 172 | lgT3-PO-lgT3-PO-lgT3-PO- | 1208 | fU-PS-fG-PS-mC-PO- | 1225 |
| | | fG-PO-mG-PO-fA-PO-mC-PO- | | fC-PO-mU-PO-fC-PO- | |
| | | fG-PO-mG-PO-fA-PO-mG-PO- | | mG-PO-fA-PO-mU-PO- | |
| | | fU-PO-mU-PO-fA-PO-mU-PO- | | fA-PO-mA-PO-fC-PO- | |
| | | fC-PO-mG-PO-fA-PO-mG-PO- | | mU-PO-fC-PO-mC-PO- | |
| | | fG-PS-mC-PS-fA | | fG-PO-mU-PO-fC-PO- | |
| | | | | mC-PS-dT-PS-dT | |
| 312 | 200 | lgT3-PO-lgT3-PO-lgT3-PO- | 1209 | fU-PS-fG-PS-mA-PO- | 1226 |
| | | fC-PO-mA-PO-fA-PO-mU-PO- | | fG-PO-mC-PO-fA-PO- | |
| | | fC-PO-mU-PO-fG-PO-mA-PO- | | mU-PO-fU-PO-mG-PO- | |
| | | fC-PO-mA-PO-fC-PO-mA-PO- | | fU-PO-mG-PO-fU-PO- | |
| | | fA-PO-mU-PO-fG-PO-mC-PO- | | mC-PO-fA-PO-mG-PO- | |
| | | fU-PS-mC-PS-fA | | fA-PO-mU-PO-fU-PO- | |
| | | | | mG-PS-dT-PS-dT | |
| 313 | 221 | lgT3-PO-lgT3-PO-lgT3-PO- | 1210 | fG-PS-fC-PS-mC-PO- | 1227 |
| | | fU-PO-mG-PO-fG-PO-mC-PO- | | fU-PO-mC-PO-fG-PO- | |
| | | fC-PO-mA-PO-fG-PO-mA-PO- | | mA-PO-fU-PO-mA-PO- | |
| | | fG-PO-mU-PO-fU-PO-mA-PO- | | fA-PO-mC-PO-fU-PO- | |
| | | fU-PO-mC-PO-fG-PO-mA-PO- | | mC-PO-fU-PO-mG-PO- | |
| | | fG-PS-mG-PS-fC | | fG-PO-mC-PO-fC-PO- | |
| | | | | mA-PS-dT-PS-dT | |
| 314 | 223 | lgT3-PO-lgT3-PO-lgT3-PO- | 1211 | fG-PS-fU-PS-mG-PO- | 1228 |
| | | fG-PO-mC-PO-fC-PO-mA-PO- | | fC-PO-mC-PO-fU-PO- | |
| | | fG-PO-mA-PO-fG-PO-mU-PO- | | mC-PO-fG-PO-mA-PO- | |
| | | fU-PO-mA-PO-fU-PO-mC-PO- | | fU-PO-mA-PO-fA-PO- | |
| | | fG-PO-mA-PO-fG-PO-mG-PO- | | mC-PO-fU-PO-mC-PO- | |
| | | fC-PS-mA-PS-fC | | fU-PO-mG-PO-fG-PO- | |
| | | | | mC-PS-dT-PS-dT | |
| 315 | 279 | lgT3-PO-lgT3-PO-lgT3-PO- | 1212 | fA-PS-fG-PS-mC-PO- | 1229 |
| | | fG-PO-mU-PO-fA-PO-mU-PO- | | fU-PO-mU-PO-LA-PO- | |
| | | fU-PO-mU-PO-fU-PO-mU-PO- | | mU-PO-LA-PO-mC-PO- | |
| | | fG-PO-mU-PO-fG-PO-mU-PO- | | fA-PO-mC-PO-fA-PO- | |
| | | fA-PO-mU-PO-fA-PO-mA-PO- | | mA-PO-LA-PO-mA-PO- | |
| | | fG-PS-mC-PS-fU | | fA-PO-mU-PO-fA-PO- | |
| | | | | mC-PS-dT-PS-dT | |
| 316 | 298 | lgT3-PO-lgT3-PO-lgT3-PO- | 1213 | fC-PS-fA-PS-mA-PO- | 1230 |
| | | fC-PO-mU-PO-fG-PO-mC-PO- | | fA-PO-mU-PO-fC-PO- | |
| | | fA-PO-mC-PO-fU-PO-mU-PO- | | mA-PO-fA-PO-mA-PO- | |
| | | fA-PO-mU-PO-fU-PO-mU-PO- | | fA-PO-mU-PO-LA-PO- | |
| | | fU-PO-mG-PO-fA-PO-mU-PO- | | mA-PO-fG-PO-mU-PO- | |
| | | fU-PS-mU-PS-fG | | fG-PO-mC-PO-fA-PO- | |
| | | | | mG-PS-dT-PS-dT | |

[0186] The sense strand and antisense strand of the dsRNA respectively comprise the nucleotide sequences of:
[0187] a) SEQ ID NOs: 1231 and 1429;
[0188] b) SEQ ID NOs: 1307 and 1505;
[0189] c) SEQ ID NOs: 1308 and 1506;
[0190] d) SEQ ID NOs: 1325 and 1523;
[0191] e) SEQ ID NOs: 1328 and 1526; or
[0192] f) SEQ ID NOs: 1369 and 1567.

[0193] Table 4 below lists the sequences of optimized GalNAc-siRNA constructs derived from selected LPA GalNAc-siRNA constructs listed in Table 3. In Table 4, mX=2′-O-Me nucleotide; fX=2′-F nucleotide; dX=DNA nucleotide; lx=locked nucleic acid (LNA) nucleotide; PO=phosphodiester linkage; and PS=phosphorothioate bond. In these constructs, the sequences of their sense strands and antisense strands correspond to the sense and antisense sequences of the corresponding constructs in Table 1, but for the inclusion of (1) the modified 2′-O-Me nucleotides and 2′-F nucleotides, (2) 3 lgT3 nucleotides at the 5′ end of the sense strands, (3) 2 lT4 nucleotides at the 3′ end of the sense strands, (4) one or more LNA nucleotides in the sense and/or antisense strands, and/or (5) phosphorothioate bonds.

TABLE 4
Exemplary Optimized LPA GalNAc-siRNA Constructs

| SiLPA | Parent | Sense strand sequence | | Antisense strand sequence | |
|---|---|---|---|---|---|
| # | siLPA# | (5′-3′) | SEQ | (5′-3′) | SEQ |
| 317 | 307 | lgT3-PO-lgT3-PO-lgT3- | 1231 | mG-PS-fU-PS-mA-PO- | 1429 |
| | | PO-mG-PO-mA-PO-mG-PO- | | fU-PO-mG-PO-mU-PO- | |
| | | mU-PO-fU-PO-mA-PO-fU- | | mG-PO-mC-PO-mC-PO- | |
| | | PO-fC-PO-fA-PO-mA-PO- | | mU-PO-mU-PO-mG-PO- | |
| | | mG-PO-mG-PO-mC-PO-mA- | | mA-PO-fU-PO-mA-PO- | |
| | | PO-mC-PO-mA-PO-mU-PS- | | fA-PO-mC-PO-mU-PO- | |
| | | mA-PS-mC | | mC-PS-mA-PS-mA | |
| 318 | 307 | lgT3-PO-lgT3-PO-lgT3- | 1232 | mG-PS-fU-PS-mA-PO- | 1430 |
| | | PO-mG-PO-mA-PO-mG-PO- | | mU-PO-mG-PO-fU-PO- | |
| | | mU-PO-fU-PO-mA-PO-fU- | | mG-PO-mC-PO-mC-PO- | |
| | | PO-fC-PO-LA-PO-mA-PO- | | mU-PO-mU-PO-mG-PO- | |
| | | mG-PO-mG-PO-mC-PO-mA- | | mA-PO-fU-PO-mA-PO- | |
| | | PO-mC-PO-mA-PO-mU-PS- | | fA-PO-mC-PO-mU-PO- | |
| | | mA-PS-mC | | mC-PS-mA-PS-mA | |
| 319 | 307 | lgT3-PO-lgT3-PO-lgT3- | 1233 | mG-PS-fU-PS-mA-PO- | 1431 |
| | | PO-mG-PO-mA-PO-mG-PO- | | fU-PO-mG-PO-mU-PO- | |
| | | mU-PO-fU-PO-mA-PO-fU- | | mG-PO-fC-PO-fC-PO- | |
| | | PO-fC-PO-fA-PO-mA-PO- | | mU-PO-mU-PO-mG-PO- | |
| | | mG-PO-mG-PO-mC-PO-mA- | | mA-PO-fU-PO-mA-PO- | |
| | | PO-mC-PO-mA-PO-mU-PS- | | fA-PO-mC-PO-mU-PO- | |
| | | mA-PS-mC | | mC-PS-mA-PS-mA | |
| 320 | 307 | lgT3-PO-lgT3-PO-lgT3- | 1234 | mG-PS-fU-PS-mA-PO- | 1432 |
| | | PO-mG-PO-mA-PO-mG-PO- | | fU-PO-mG-PO-mU-PO- | |
| | | mU-PO-fU-PO-mA-PO-fU- | | mG-PO-mC-PO-fC-PO- | |
| | | PO-fC-PO-fA-PO-mA-PO- | | mU-PO-mU-PO-mG-PO- | |
| | | mG-PO-mG-PO-mC-PO-mA- | | mA-PO-fU-PO-mA-PO- | |
| | | PO-mC-PO-mA-PO-mU-PS- | | fA-PO-mC-PO-mU-PO- | |
| | | mA-PS-mC | | mC-PS-mA-PS-mA | |
| 321 | 307 | lgT3-PO-lgT3-PO-lgT3- | 1235 | fG-PS-fU-PS-mA-PO- | 1433 |
| | | PO-mG-PO-mA-PO-mG-PO- | | fU-PO-mG-PO-fU-PO- | |
| | | mU-PO-fU-PO-mA-PO-fU- | | mG-PO-fC-PO-mC-PO- | |
| | | PO-fC-PO-fA-PO-mA-PO- | | fU-PO-mU-PO-mG-PO- | |
| | | mG-PO-mG-PO-mC-PO-mA- | | mA-PO-fU-PO-mA-PO- | |
| | | PO-mC-PO-mA-PO-mU-PS- | | fA-PO-mC-PO-fU-PO- | |
| | | mA-PS-mC | | mC-PS-dT-PS-dT | |
| 322 | 307 | lgT3-PO-lgT3-PO-lgT3- | 1236 | mG-PS-fU-PS-mA-PO- | 1434 |
| | | PO-1G-PO-LA-PO-mG-PO- | | fU-PO-mG-PO-mU-PO- | |
| | | mU-PO-fU-PO-mA-PO-fU- | | mG-PO-mC-PO-mC-PO- | |
| | | PO-fC-PO-fA-PO-mA-PO- | | mU-PO-mU-PO-mG-PO- | |
| | | mG-PO-mG-PO-mC-PO-mA- | | mA-PO-fU-PO-mA-PO- | |
| | | PO-mC-PO-mA-PO-mU-PS- | | fA-PO-mC-PO-mU-PO- | |
| | | mA-PS-mC | | mC-PS-mA-PS-mA | |
| 323 | 307 | lgT3-PO-lgT3-PO-lgT3- | 1237 | mG-PS-fU-PS-mA-PO- | 1435 |
| | | PO-1G-PO-LA-PO-mG-PO- | | mU-PO-mG-PO-fU-PO- | |
| | | mU-PO-fU-PO-mA-PO-fU- | | mG-PO-mC-PO-mC-PO- | |
| | | PO-fC-PO-fA-PO-mA-PO- | | mU-PO-mU-PO-mG-PO- | |
| | | mG-PO-mG-PO-mC-PO-mA- | | mA-PO-fU-PO-mA-PO- | |
| | | PO-mC-PO-mA-PO-mU-PS- | | fA-PO-mC-PO-mU-PO- | |
| | | mA-PS-mC | | mC-PS-mA-PS-mA | |
| 324 | 307 | lgT3-PO-lgT3-PO-lgT3- | 1238 | mG-PS-fU-PS-mA-PO- | 1436 |
| | | PO-1G-PO-lA-PO-mG-PO- | | fU-PO-mG-PO-mU-PO- | |
| | | mU-PO-fU-PO-mA-PO-fU- | | mG-PO-fC-PO-fC-PO- | |
| | | PO-fC-PO-LA-PO-mA-PO- | | mU-PO-mU-PO-mG-PO- | |
| | | mG-PO-mG-PO-mC-PO-mA- | | mA-PO-fU-PO-mA-PO- | |
| | | PO-mC-PO-mA-PO-mU-PS- | | fA-PO-mC-PO-mU-PO- | |
| | | mA-PS-mC | | mC-PS-mA-PS-mA | |
| 325 | 307 | lgT3-PO-lgT3-PO-lgT3- | 1239 | mG-PS-fU-PS-mA-PO- | 1437 |
| | | PO-1G-PO-LA-PO-mG-PO- | | fU-PO-mG-PO-mU-PO- | |
| | | mU-PO-fU-PO-mA-PO-fU- | | mG-PO-mC-PO-fC-PO- | |
| | | PO-fC-PO-fA-PO-mA-PO- | | mU-PO-mU-PO-mG-PO- | |
| | | mG-PO-mG-PO-mC-PO-mA- | | mA-PO-fU-PO-mA-PO- | |
| | | PO-mC-PO-mA-PO-mU-PS- | | fA-PO-mC-PO-mU-PO- | |
| | | mA-PS-mC | | mC-PS-mA-PS-mA | |
| 326 | 307 | lgT3-PO-lgT3-PO-lgT3- | 1240 | fG-PS-fU-PS-mA-PO- | 1438 |
| | | PO-1G-PO-LA-PO-mG-PO- | | fU-PO-mG-PO-fU-PO- | |
| | | mU-PO-fU-PO-mA-PO-fU- | | mG-PO-fC-PO-mC-PO- | |
| | | PO-fC-PO-fA-PO-mA-PO- | | fU-PO-mU-PO-mG-PO- | |
| | | mG-PO-mG-PO-mC-PO-mA- | | mA-PO-fU-PO-mA-PO- | |
| | | PO-mC-PO-mA-PO-mU-PS- | | fA-PO-mC-PO-fU-PO- | |
| | | mA-PS-mC | | mC-PS-dT-PS-dT | |
| 327 | 307 | lgT3-PO-lgT3-PO-lgT3- | 1241 | mG-PS-fU-PS-mA-PO- | 1439 |
| | | PO-mG-PO-mA-PO-mG-PO- | | fU-PO-mG-PO-mU-PO- | |
| | | mU-PO-fU-PO-mA-PO-fU- | | mG-PO-mC-PO-mC-PO- | |
| | | PO-fC-PO-fA-PO-mA-PO- | | mU-PO-mU-PO-mG-PO- | |
| | | mG-PO-mG-PO-mC-PO-mA- | | mA-PO-fU-PO-mA-PO- | |
| | | PO-mC-PO-mA-PO-mU-PO- | | fA-PO-mC-PO-mU-PO- | |
| | | lT4-PO-lT4 | | mC-PS-mA-PS-mA | |
| 328 | 307 | lgT3-PO-lgT3-PO-lgT3- | 1242 | mG-PS-fU-PS-mA-PO- | 1440 |
| | | PO-mG-PO-mA-PO-mG-PO- | | mU-PO-mG-PO-fU-PO- | |
| | | mU-PO-fU-PO-mA-PO-fU- | | mG-PO-mC-PO-mC-PO- | |
| | | PO-fC-PO-fA-PO-mA-PO- | | mU-PO-mU-PO-mG-PO- | |
| | | mG-PO-mG-PO-mC-PO-mA- | | mA-PO-fU-PO-mA-PO- | |
| | | PO-mC-PO-mA-PO-mU-PO- | | fA-PO-mC-PO-mU-PO- | |
| | | lT4-PO-lT4 | | mC-PS-mA-PS-mA | |
| 329 | 307 | lgT3-PO-lgT3-PO-lgT3- | 1243 | mG-PS-fU-PS-mA-PO- | 1441 |
| | | PO-mG-PO-mA-PO-mG-PO- | | fU-PO-mG-PO-mU-PO- | |
| | | mU-PO-fU-PO-mA-PO-fU- | | mG-PO-fC-PO-fC-PO- | |
| | | PO-fC-PO-fA-PO-mA-PO- | | mU-PO-mU-PO-mG-PO- | |
| | | mG-PO-mG-PO-mC-PO-mA- | | mA-PO-fU-PO-mA-PO- | |
| | | PO-mC-PO-mA-PO-mU-PO- | | fA-PO-mC-PO-mU-PO- | |
| | | lT4-PO-lT4 | | mC-PS-mA-PS-mA | |
| 330 | 307 | lgT3-PO-lgT3-PO-lgT3- | 1244 | mG-PS-fU-PS-mA-PO- | 1442 |
| | | PO-mG-PO-mA-PO-mG-PO- | | fU-PO-mG-PO-mU-PO- | |
| | | mU-PO-fU-PO-mA-PO-fU- | | mG-PO-mC-PO-fC-PO- | |
| | | PO-fC-PO-fA-PO-mA-PO- | | mU-PO-mU-PO-mG-PO- | |
| | | mG-PO-mG-PO-mC-PO-mA- | | mA-PO-fU-PO-mA-PO- | |
| | | PO-mC-PO-mA-PO-mU-PO- | | fA-PO-mC-PO-mU-PO- | |
| | | lT4-PO-lT4 | | mC-PS-mA-PS-mA | |
| 331 | 307 | lgT3-PO-lgT3-PO-lgT3- | 1245 | fG-PS-fU-PS-mA-PO- | 1443 |
| | | PO-mG-PO-mA-PO-mG-PO- | | fU-PO-mG-PO-fU-PO- | |
| | | mU-PO-fU-PO-mA-PO-fU- | | mG-PO-fC-PO-mC-PO- | |
| | | PO-fC-PO-fA-PO-mA-PO- | | fU-PO-mU-PO-mG-PO- | |
| | | mG-PO-mG-PO-mC-PO-mA- | | mA-PO-fU-PO-mA-PO- | |
| | | PO-mC-PO-mA-PO-mU-PO- | | fA-PO-mC-PO-fU-PO- | |
| | | lT4-PO-lT4 | | mC-PS-dT-PS-dT | |
| 332 | 307 | lgT3-PO-lgT3-PO-lgT3- | 1246 | mG-PS-fU-PS-mA-PO- | 1444 |
| | | PO-mG-PO-mA-PO-mG-PO- | | fU-PO-mG-PO-mU-PO- | |
| | | mU-PO-fU-PO-mA-PO-fU- | | mG-PO-mC-PO-mC-PO- | |
| | | PO-fC-PO-fA-PO-mA-PO- | | mU-PO-mU-PO-mG-PO- | |
| | | mG-PO-mG-PO-mC-PO-mA- | | mA-PO-fU-PO-mA-PO- | |
| | | PO-mC-PO-mA-PO-mU-PO- | | fA-PO-mC-PO-mU-PO- | |
| | | lT4-PO-lT4 | | mC-PS-LA-PS-lA | |
| 333 | 307 | lgT3-PO-lgT3-PO-lgT3- | 1247 | mG-PS-fU-PS-mA-PO- | 1445 |
| | | PO-mG-PO-mA-PO-mG-PO- | | mU-PO-mG-PO-fU-PO- | |
| | | mU-PO-fU-PO-mA-PO-fU- | | mG-PO-mC-PO-mC-PO- | |
| | | PO-fC-PO-fA-PO-mA-PO- | | mU-PO-mU-PO-mG-PO- | |
| | | mG-PO-mG-PO-mC-PO-mA- | | mA-PO-fU-PO-mA-PO- | |
| | | PO-mC-PO-mA-PO-mU-PO- | | fA-PO-mC-PO-mU-PO- | |
| | | lT4-PO-lT4 | | mC-PS-LA-PS-lA | |
| 334 | 307 | lgT3-PO-lgT3-PO-lgT3- | 1248 | mG-PS-fU-PS-mA-PO- | 1446 |
| | | PO-mG-PO-mA-PO-mG-PO- | | fU-PO-mG-PO-mU-PO- | |
| | | mU-PO-fU-PO-mA-PO-fU- | | mG-PO-fC-PO-fC-PO- | |
| | | PO-fC-PO-fA-PO-mA-PO- | | mU-PO-mU-PO-mG-PO- | |
| | | mG-PO-mG-PO-mC-PO-mA- | | mA-PO-fU-PO-mA-PO- | |
| | | PO-mC-PO-mA-PO-mU-PO- | | fA-PO-mC-PO-mU-PO- | |
| | | lT4-PO-lT4 | | mC-PS-LA-PS-lA | |
| 335 | 307 | lgT3-PO-lgT3-PO-lgT3- | 1249 | mG-PS-fU-PS-mA-PO- | 1447 |
| | | PO-mG-PO-mA-PO-mG-PO- | | fU-PO-mG-PO-mU-PO- | |
| | | mU-PO-fU-PO-mA-PO-fU- | | mG-PO-mC-PO-fC-PO- | |
| | | PO-fC-PO-fA-PO-mA-PO- | | mU-PO-mU-PO-mG-PO- | |
| | | mG-PO-mG-PO-mC-PO-mA- | | mA-PO-fU-PO-mA-PO- | |
| | | PO-mC-PO-mA-PO-mU-PO- | | fA-PO-mC-PO-mU-PO- | |
| | | lT4-PO-lT4 | | mC-PS-LA-PS-lA | |
| 336 | 307 | lgT3-PS-lgT3-PS-lgT3- | 1250 | mG-PS-fU-PS-mA-PO- | 1448 |
| | | PO-mG-PO-mA-PO-mG-PO- | | fU-PO-mG-PO-mU-PO- | |
| | | mU-PO-fU-PO-mA-PO-fU- | | mG-PO-mC-PO-mC-PO- | |
| | | PO-fC-PO-fA-PO-mA-PO- | | mU-PO-mU-PO-mG-PO- | |
| | | mG-PO-mG-PO-mC-PO-mA- | | mA-PO-fU-PO-mA-PO- | |
| | | PO-mC-PO-mA-PO-mU-PS- | | fA-PO-mC-PO-mU-PO- | |
| | | lT4-PS-lT4 | | mC-PS-mA-PS-mA | |
| 337 | 307 | lgT3-PS-lgT3-PS-lgT3- | 1251 | mG-PS-fU-PS-mA-PO- | 1449 |
| | | PO-mG-PO-mA-PO-mG-PO- | | mU-PO-mG-PO-fU-PO- | |
| | | mU-PO-fU-PO-mA-PO-fU- | | mG-PO-mC-PO-mC-PO- | |
| | | PO-fC-PO-fA-PO-mA-PO- | | mU-PO-mU-PO-mG-PO- | |
| | | mG-PO-mG-PO-mC-PO-mA- | | mA-PO-fU-PO-mA-PO- | |
| | | PO-mC-PO-mA-PO-mU-PS- | | fA-PO-mC-PO-mU-PO- | |
| | | lT4-PS-lT4 | | mC-PS-mA-PS-mA | |
| 338 | 307 | lgT3-PS-lgT3-PS-lgT3- | 1252 | mG-PS-fU-PS-mA-PO- | 1450 |
| | | PO-mG-PO-mA-PO-mG-PO- | | fU-PO-mG-PO-mU-PO- | |
| | | mU-PO-fU-PO-mA-PO-fU- | | mG-PO-fC-PO-fC-PO- | |
| | | PO-fC-PO-fA-PO-mA-PO- | | mU-PO-mU-PO-mG-PO- | |
| | | mG-PO-mG-PO-mC-PO-mA- | | mA-PO-fU-PO-mA-PO- | |
| | | PO-mC-PO-mA-PO-mU-PS- | | fA-PO-mC-PO-mU-PO- | |
| | | lT4-PS-lT4 | | mC-PS-mA-PS-mA | |
| 339 | 307 | lgT3-PS-lgT3-PS-lgT3- | 1253 | mG-PS-fU-PS-mA-PO- | 1451 |
| | | PO-mG-PO-mA-PO-mG-PO- | | fU-PO-mG-PO-mU-PO- | |
| | | mU-PO-fU-PO-mA-PO-fU- | | mG-PO-mC-PO-fC-PO- | |
| | | PO-fC-PO-fA-PO-mA-PO- | | mU-PO-mU-PO-mG-PO- | |
| | | mG-PO-mG-PO-mC-PO-mA- | | mA-PO-fU-PO-mA-PO- | |
| | | PO-mC-PO-mA-PO-mU-PS- | | fA-PO-mC-PO-mU-PO- | |
| | | lT4-PS-lT4 | | mC-PS-mA-PS-mA | |
| 340 | 307 | lgT3-PS-lgT3-PS-lgT3- | 1254 | fG-PS-fU-PS-mA-PO- | 1452 |
| | | PO-mG-PO-mA-PO-mG-PO- | | fU-PO-mG-PO-fU-PO- | |
| | | mU-PO-fU-PO-mA-PO-fU- | | mG-PO-fC-PO-mC-PO- | |
| | | PO-fC-PO-fA-PO-mA-PO- | | fU-PO-mU-PO-mG-PO- | |
| | | mG-PO-mG-PO-mC-PO-mA- | | mA-PO-fU-PO-mA-PO- | |
| | | PO-mC-PO-mA-PO-mU-PS- | | fA-PO-mC-PO-fU-PO- | |
| | | lT4-PS-lT4 | | mC-PS-dT-PS-dT | |
| 341 | 307 | lgT3-PS-lgT3-PS-lgT3- | 1255 | mG-PS-fU-PS-mA-PO- | 1453 |
| | | PO-mG-PO-mA-PO-mG-PO- | | fU-PO-mG-PO-mU-PO- | |
| | | mU-PO-fU-PO-mA-PO-fU- | | mG-PO-mC-PO-mC-PO- | |
| | | PO-fC-PO-fA-PO-mA-PO- | | mU-PO-mU-PO-mG-PO- | |
| | | mG-PO-mG-PO-mC-PO-mA- | | mA-PO-fU-PO-mA-PO- | |
| | | PO-mC-PO-mA-PO-mU-PS- | | fA-PO-mC-PO-mU-PO- | |
| | | lT4-PS-lT4 | | mC-PS-LA-PS-lA | |
| 342 | 307 | lgT3-PS-lgT3-PS-lgT3- | 1256 | mG-PS-fU-PS-mA-PO- | 1454 |
| | | PO-mG-PO-mA-PO-mG-PO- | | mU-PO-mG-PO-fU-PO- | |
| | | mU-PO-fU-PO-mA-PO-fU- | | mG-PO-mC-PO-mC-PO- | |
| | | PO-fC-PO-fA-PO-mA-PO- | | mU-PO-mU-PO-mG-PO- | |
| | | mG-PO-mG-PO-mC-PO-mA- | | mA-PO-fU-PO-mA-PO- | |
| | | PO-mC-PO-mA-PO-mU-PS- | | fA-PO-mC-PO-mU-PO- | |
| | | lT4-PS-lT4 | | mC-PS-LA-PS-lA | |
| 343 | 307 | lgT3-PS-lgT3-PS-lgT3- | 1257 | mG-PS-fU-PS-mA-PO- | 1455 |
| | | PO-mG-PO-mA-PO-mG-PO- | | fU-PO-mG-PO-mU-PO- | |
| | | mU-PO-fU-PO-mA-PO-fU- | | mG-PO-fC-PO-fC-PO- | |
| | | PO-fC-PO-fA-PO-mA-PO- | | mU-PO-mU-PO-mG-PO- | |
| | | mG-PO-mG-PO-mC-PO-mA- | | mA-PO-fU-PO-mA-PO- | |
| | | PO-mC-PO-mA-PO-mU-PS- | | fA-PO-mC-PO-mU-PO- | |
| | | lT4-PS-lT4 | | mC-PS-LA-PS-lA | |
| 344 | 307 | lgT3-PS-lgT3-PS-lgT3- | 1258 | mG-PS-fU-PS-mA-PO- | 1456 |
| | | PO-mG-PO-mA-PO-mG-PO- | | fU-PO-mG-PO-mU-PO- | |
| | | mU-PO-fU-PO-mA-PO-fU- | | mG-PO-mC-PO-fC-PO- | |
| | | PO-fC-PO-fA-PO-mA-PO- | | mU-PO-mU-PO-mG-PO- | |
| | | mG-PO-mG-PO-mC-PO-mA- | | mA-PO-fU-PO-mA-PO- | |
| | | PO-mC-PO-mA-PO-mU-PS- | | fA-PO-mC-PO-mU-PO- | |
| | | lT4-PS-lT4 | | mC-PS-LA-PS-lA | |
| 345 | 307 | lgT3-PO-lgT3-PO-lgT3- | 1259 | mG-PS-fU-PS-mA-PO- | 1457 |
| | | PO-1G-PO-LA-PO-mG-PO- | | fU-PO-mG-PO-mU-PO- | |
| | | mU-PO-fU-PO-mA-PO-fU- | | mG-PO-mC-PO-mC-PO- | |
| | | PO-fC-PO-fA-PO-mA-PO- | | mU-PO-mU-PO-mG-PO- | |
| | | mG-PO-mG-PO-mC-PO-mA- | | mA-PO-fU-PO-mA-PO- | |
| | | PO-mC-PO-mA-PO-mU-PO- | | fA-PO-mC-PO-mU-PO- | |
| | | lT4-PO-lT4 | | mC-PS-mA-PS-mA | |
| 346 | 307 | lgT3-PO-lgT3-PO-lgT3- | 1260 | mG-PS-fU-PS-mA-PO- | 1458 |
| | | PO-1G-PO-LA-PO-mG-PO- | | mU-PO-mG-PO-fU-PO- | |
| | | mU-PO-fU-PO-mA-PO-fU- | | mG-PO-mC-PO-mC-PO- | |
| | | PO-fC-PO-fA-PO-mA-PO- | | mU-PO-mU-PO-mG-PO- | |
| | | mG-PO-mG-PO-mC-PO-mA- | | mA-PO-fU-PO-mA-PO- | |
| | | PO-mC-PO-mA-PO-mU-PO- | | fA-PO-mC-PO-mU-PO- | |
| | | lT4-PO-lT4 | | mC-PS-mA-PS-mA | |
| 347 | 307 | lgT3-PO-lgT3-PO-lgT3- | 1261 | mG-PS-fU-PS-mA-PO- | 1459 |
| | | PO-1G-PO-lA-PO-mG-PO- | | fU-PO-mG-PO-mU-PO- | |
| | | mU-PO-fU-PO-mA-PO-fU- | | mG-PO-fC-PO-fC-PO- | |
| | | PO-fC-PO-fA-PO-mA-PO- | | mU-PO-mU-PO-mG-PO- | |
| | | mG-PO-mG-PO-mC-PO-mA- | | mA-PO-fU-PO-mA-PO- | |
| | | PO-mC-PO-mA-PO-mU-PO- | | fA-PO-mC-PO-mU-PO- | |
| | | lT4-PO-lT4 | | mC-PS-mA-PS-mA | |
| 348 | 307 | lgT3-PO-lgT3-PO-lgT3- | 1262 | mG-PS-fU-PS-mA-PO- | 1460 |
| | | PO-1G-PO-LA-PO-mG-PO- | | fU-PO-mG-PO-mU-PO- | |
| | | mU-PO-fU-PO-mA-PO-fU- | | mG-PO-mC-PO-fC-PO- | |
| | | PO-fC-PO-fA-PO-mA-PO- | | mU-PO-mU-PO-mG-PO- | |
| | | mG-PO-mG-PO-mC-PO-mA- | | mA-PO-fU-PO-mA-PO- | |
| | | PO-mC-PO-mA-PO-mU-PO- | | fA-PO-mC-PO-mU-PO- | |
| | | lT4-PO-lT4 | | mC-PS-mA-PS-mA | |
| 349 | 307 | lgT3-PO-lgT3-PO-lgT3- | 1263 | fG-PS-fU-PS-mA-PO- | 1461 |
| | | PO-1G-PO-LA-PO-mG-PO- | | fU-PO-mG-PO-fU-PO- | |
| | | mU-PO-fU-PO-mA-PO-fU- | | mG-PO-fC-PO-mC-PO- | |
| | | PO-fC-PO-fA-PO-mA-PO- | | fU-PO-mU-PO-mG-PO- | |
| | | mG-PO-mG-PO-mC-PO-mA- | | mA-PO-fU-PO-mA-PO- | |
| | | PO-mC-PO-mA-PO-mU-PO- | | fA-PO-mC-PO-fU-PO- | |
| | | lT4-PO-lT4 | | mC-PS-dT-PS-dT | |
| 350 | 307 | lgT3-PS-lgT3-PS-lgT3- | 1264 | mG-PS-fU-PS-mA-PO- | 1462 |
| | | PO-1G-PO-lA-PO-mG-PO- | | fU-PO-mG-PO-mU-PO- | |
| | | mU-PO-fU-PO-mA-PO-fU- | | mG-PO-mC-PO-mC-PO- | |
| | | PO-fC-PO-fA-PO-mA-PO- | | mU-PO-mU-PO-mG-PO- | |
| | | mG-PO-mG-PO-mC-PO-mA- | | mA-PO-fU-PO-mA-PO- | |
| | | PO-mC-PO-mA-PO-mU-PS- | | fA-PO-mC-PO-mU-PO- | |
| | | lT4-PS-lT4 | | mC-PS-mA-PS-mA | |
| 351 | 307 | lgT3-PS-lgT3-PS-lgT3- | 1265 | mG-PS-fU-PS-mA-PO- | 1463 |
| | | PO-1G-PO-LA-PO-mG-PO- | | mU-PO-mG-PO-fU-PO- | |
| | | mU-PO-fU-PO-mA-PO-fU- | | mG-PO-mC-PO-mC-PO- | |
| | | PO-fC-PO-fA-PO-mA-PO- | | mU-PO-mU-PO-mG-PO- | |
| | | mG-PO-mG-PO-mC-PO-mA- | | mA-PO-fU-PO-mA-PO- | |
| | | PO-mC-PO-mA-PO-mU-PS- | | fA-PO-mC-PO-mU-PO- | |
| | | lT4-PS-lT4 | | mC-PS-mA-PS-mA | |
| 352 | 307 | lgT3-PS-lgT3-PS-lgT3- | 1266 | mG-PS-fU-PS-mA-PO- | 1464 |
| | | PO-1G-PO-LA-PO-mG-PO- | | fU-PO-mG-PO-mU-PO- | |
| | | mU-PO-fU-PO-mA-PO-fU- | | mG-PO-fC-PO-fC-PO- | |
| | | PO-fC-PO-fA-PO-mA-PO- | | mU-PO-mU-PO-mG-PO- | |
| | | mG-PO-mG-PO-mC-PO-mA- | | mA-PO-fU-PO-mA-PO- | |
| | | PO-mC-PO-mA-PO-mU-PS- | | fA-PO-mC-PO-mU-PO- | |
| | | lT4-PS-lT4 | | mC-PS-mA-PS-mA | |
| 353 | 307 | lgT3-PS-lgT3-PS-lgT3- | 1267 | mG-PS-fU-PS-mA-PO- | 1465 |
| | | PO-1G-PO-lA-PO-mG-PO- | | fU-PO-mG-PO-mU-PO- | |
| | | mU-PO-fU-PO-mA-PO-fU- | | mG-PO-mC-PO-fC-PO- | |
| | | PO-fC-PO-fA-PO-mA-PO- | | mU-PO-mU-PO-mG-PO- | |
| | | mG-PO-mG-PO-mC-PO-mA- | | mA-PO-fU-PO-mA-PO- | |
| | | PO-mC-PO-mA-PO-mU-PS- | | fA-PO-mC-PO-mU-PO- | |
| | | lT4-PS-lT4 | | mC-PS-mA-PS-mA | |
| 354 | 307 | lgT3-PS-lgT3-PS-lgT3- | 1268 | fG-PS-fU-PS-mA-PO- | 1466 |
| | | PO-1G-PO-LA-PO-mG-PO- | | fU-PO-mG-PO-fU-PO- | |
| | | MU-PO-fU-PO-mA-PO-fU- | | mG-PO-fC-PO-mC-PO- | |
| | | PO-fC-PO-fA-PO-mA-PO- | | fU-PO-mU-PO-mG-PO- | |
| | | mG-PO-mG-PO-mC-PO-mA- | | mA-PO-fU-PO-mA-PO- | |
| | | PO-mC-PO-mA-PO-mU-PS- | | fA-PO-mC-PO-fU-PO- | |
| | | lT4-PS-lT4 | | mC-PS-dT-PS-dT | |
| 355 | 307 | lgT3-PO-lgT3-PO-lgT3- | 1269 | mG-PS-fU-PS-mA-PO- | 1467 |
| | | PO-mG-PO-mA-PO-mG-PO- | | fU-PO-mG-PO-mU-PO- | |
| | | mU-PO-fU-PO-mA-PO-fU- | | mG-PO-mC-PO-mC-PO- | |
| | | PO-fC-PO-fA-PO-mA-PO- | | mU-PO-mU-PO-mG-PO- | |
| | | mG-PO-mG-PO-mC-PO-mA- | | mA-PO-fU-PO-mA-PO- | |
| | | PO-mC-PO-mA-PO-mU-PO- | | fA-PO-mC-PO-mU-PO- | |
| | | mA-PO-mC-PO-lT4-PO-lT4 | | mC-PS-mA-PS-mA | |
| 356 | 307 | lgT3-PO-lgT3-PO-lgT3- | 1270 | mG-PS-fU-PS-mA-PO- | 1468 |
| | | PO-mG-PO-mA-PO-mG-PO- | | mU-PO-mG-PO-fU-PO- | |
| | | mU-PO-fU-PO-mA-PO-fU- | | mG-PO-mC-PO-mC-PO- | |
| | | PO-fC-PO-fA-PO-mA-PO- | | mU-PO-mU-PO-mG-PO- | |
| | | mG-PO-mG-PO-mC-PO-mA- | | mA-PO-fU-PO-mA-PO- | |
| | | PO-mC-PO-mA-PO-mU-PO- | | fA-PO-mC-PO-mU-PO- | |
| | | mA-PO-mC-PO-lT4-PO-lT4 | | mC-PS-mA-PS-mA | |
| 357 | 307 | lgT3-PO-lgT3-PO-lgT3- | 1271 | mG-PS-fU-PS-mA-PO- | 1469 |
| | | PO-mG-PO-mA-PO-mG-PO- | | fU-PO-mG-PO-mU-PO- | |
| | | mU-PO-fU-PO-mA-PO-fU- | | mG-PO-fC-PO-fC-PO- | |
| | | PO-fC-PO-fA-PO-mA-PO- | | mU-PO-mU-PO-mG-PO- | |
| | | mG-PO-mG-PO-mC-PO-mA- | | mA-PO-fU-PO-mA-PO- | |
| | | PO-mC-PO-mA-PO-mU-PO- | | fA-PO-mC-PO-mU-PO- | |
| | | mA-PO-mC-PO-lT4-PO-lT4 | | mC-PS-mA-PS-mA | |
| 358 | 307 | lgT3-PO-lgT3-PO-lgT3- | 1272 | mG-PS-fU-PS-mA-PO- | 1470 |
| | | PO-mG-PO-mA-PO-mG-PO- | | fU-PO-mG-PO-mU-PO- | |
| | | mU-PO-fU-PO-mA-PO-fU- | | mG-PO-mC-PO-fC-PO- | |
| | | PO-fC-PO-fA-PO-mA-PO- | | mU-PO-mU-PO-mG-PO- | |
| | | mG-PO-mG-PO-mC-PO-mA- | | mA-PO-fU-PO-mA-PO- | |
| | | PO-mC-PO-mA-PO-mU-PO- | | fA-PO-mC-PO-mU-PO- | |
| | | mA-PO-mC-PO-lT4-PO-lT4 | | mC-PS-mA-PS-mA | |
| 359 | 307 | lgT3-PO-lgT3-PO-lgT3- | 1273 | fG-PS-fU-PS-mA-PO- | 1471 |
| | | PO-mG-PO-mA-PO-mG-PO- | | fU-PO-mG-PO-fU-PO- | |
| | | mU-PO-fU-PO-mA-PO-fU- | | mG-PO-fC-PO-mC-PO- | |
| | | PO-fC-PO-fA-PO-mA-PO- | | fU-PO-mU-PO-mG-PO- | |
| | | mG-PO-mG-PO-mC-PO-mA- | | mA-PO-fU-PO-mA-PO- | |
| | | PO-mC-PO-mA-PO-mU-PO- | | fA-PO-mC-PO-fU-PO- | |
| | | mA-PO-mC-PO-lT4-PO-lT4 | | mC-PS-dT-PS-dT | |
| 360 | 307 | lgT3-PO-lgT3-PO-lgT3- | 1274 | mG-PS-fU-PS-mA-PO- | 1472 |
| | | PO-mG-PO-mA-PO-mG-PO- | | fU-PO-mG-PO-mU-PO- | |
| | | mU-PO-fU-PO-mA-PO-fU- | | mG-PO-mC-PO-mC-PO- | |
| | | PO-fC-PO-fA-PO-mA-PO- | | mU-PO-mU-PO-mG-PO- | |
| | | mG-PO-mG-PO-mC-PO-mA- | | mA-PO-fU-PO-mA-PO- | |
| | | PO-mC-PO-mA-PO-mU-PO- | | fA-PO-mC-PO-mU-PO- | |
| | | mA-PO-mC-PO-lT4-PO-lT4 | | mC-PS-LA-PS-lA | |
| 36 | 307 | lgT3-PO-lgT3-PO-lgT3- | 1275 | mG-PS-fU-PS-mA-PO- | 1473 |
| | | PO-mG-PO-mA-PO-mG-PO- | | mU-PO-mG-PO-fU-PO- | |
| | | mU-PO-fU-PO-mA-PO-fU- | | mG-PO-mC-PO-mC-PO- | |
| | | PO-fC-PO-fA-PO-mA-PO- | | mU-PO-mU-PO-mG-PO- | |
| | | mG-PO-mG-PO-mC-PO-mA- | | mA-PO-fU-PO-mA-PO- | |
| | | PO-mC-PO-mA-PO-mU-PO- | | fA-PO-mC-PO-mU-PO- | |
| | | mA-PO-mC-PO-lT4-PO-lT4 | | mC-PS-LA-PS-lA | |
| 362 | 307 | lgT3-PO-lgT3-PO-lgT3- | 1276 | mG-PS-fU-PS-mA-PO- | 1474 |
| | | PO-mG-PO-mA-PO-mG-PO- | | fU-PO-mG-PO-mU-PO- | |
| | | mU-PO-fU-PO-mA-PO-fU- | | mG-PO-fC-PO-fC-PO- | |
| | | PO-fC-PO-fA-PO-mA-PO- | | mU-PO-mU-PO-mG-PO- | |
| | | mG-PO-mG-PO-mC-PO-mA- | | mA-PO-fU-PO-mA-PO- | |
| | | PO-mC-PO-mA-PO-mU-PO- | | fA-PO-mC-PO-mU-PO- | |
| | | mA-PO-mC-PO-lT4-PO-lT4 | | mC-PS-LA-PS-lA | |
| 363 | \|307 | lgT3-PO-lgT3-PO-lgT3- | 1277 | mG-PS-fU-PS-mA-PO- | 1475 |
| | | PO-mG-PO-mA-PO-mG-PO- | | fU-PO-mG-PO-mU-PO- | |
| | | mU-PO-fU-PO-mA-PO-fU- | | mG-PO-mC-PO-fC-PO- | |
| | | PO-fC-PO-A-PO-mA-PO- | | mU-PO-mU-PO-mG-PO- | |
| | | mG-PO-mG-PO-mC-PO-mA- | | mA-PO-fU-PO-mA-PO- | |
| | | PO-mC-PO-mA-PO-mU-PO- | | fA-PO-mC-PO-mU-PO- | |
| | | mA-PO-mC-PO-lT4-PO-lT4 | | mC-PS-LA-PS-lA | |
| 364 | 307 | lgT3-PS-lgT3-PS-lgT3- | 1278 | mG-PS-fU-PS-mA-PO- | 1476 |
| | | PO-mG-PO-mA-PO-mG-PO- | | fU-PO-mG-PO-mU-PO- | |
| | | mU-PO-fU-PO-mA-PO-fU- | | mG-PO-mC-PO-mC-PO- | |
| | | PO-fC-PO-fA-PO-mA-PO- | | mU-PO-mU-PO-mG-PO- | |
| | | mG-PO-mG-PO-mC-PO-mA- | | mA-PO-fU-PO-mA-PO- | |
| | | PO-mC-PO-mA-PO-mU-PO- | | fA-PO-mC-PO-mU-PO- | |
| | | mA-PO-mC-PS-lT4-PS-lT4 | | mC-PS-mA-PS-mA | |
| 365 | 307 | lgT3-PS-lgT3-PS-lgT3- | 1279 | mG-PS-fU-PS-mA-PO- | 1477 |
| | | PO-mG-PO-mA-PO-mG-PO- | | mU-PO-mG-PO-fU-PO- | |
| | | mU-PO-fU-PO-mA-PO-fU- | | mG-PO-mC-PO-mC-PO- | |
| | | PO-fC-PO-fA-PO-mA-PO- | | mU-PO-mU-PO-mG-PO- | |
| | | mG-PO-mG-PO-mC-PO-mA- | | mA-PO-fU-PO-mA-PO- | |
| | | PO-mC-PO-mA-PO-mU-PO- | | fA-PO-mC-PO-mU-PO- | |
| | | mA-PO-mC-PS-lT4-PS-lT4 | | mC-PS-mA-PS-mA | |
| 366 | 307 | lgT3-PS-lgT3-PS-lgT3- | 1280 | mG-PS-fU-PS-mA-PO- | 1478 |
| | | PO-mG-PO-mA-PO-mG-PO- | | fU-PO-mG-PO-mU-PO- | |
| | | mU-PO-fU-PO-mA-PO-fU- | | mG-PO-fC-PO-fC-PO- | |
| | | PO-fC-PO-fA-PO-mA-PO- | | mU-PO-mU-PO-mG-PO- | |
| | | mG-PO-mG-PO-mC-PO-mA- | | mA-PO-fU-PO-mA-PO- | |
| | | PO-mC-PO-mA-PO-mU-PO- | | fA-PO-mC-PO-mU-PO- | |
| | | mA-PO-mC-PS-lT4-PS-lT4 | | mC-PS-mA-PS-mA | |
| 367 | 307 | lgT3-PS-lgT3-PS-lgT3- | 1281 | mG-PS-fU-PS-mA-PO- | 1479 |
| | | PO-mG-PO-mA-PO-mG-PO- | | fU-PO-mG-PO-mU-PO- | |
| | | mU-PO-fU-PO-mA-PO-fU- | | mG-PO-mC-PO-fC-PO- | |
| | | PO-fC-PO-fA-PO-mA-PO- | | mU-PO-mU-PO-mG-PO- | |
| | | mG-PO-mG-PO-mC-PO-mA- | | mA-PO-fU-PO-mA-PO- | |
| | | PO-mC-PO-mA-PO-mU-PO- | | fA-PO-mC-PO-mU-PO- | |
| | | mA-PO-mC-PS-lT4-PS-lT4 | | mC-PS-mA-PS-mA | |
| 368 | 307 | lgT3-PS-lgT3-PS-lgT3- | 1282 | fG-PS-fU-PS-mA-PO- | 1480 |
| | | PO-mG-PO-mA-PO-mG-PO- | | fU-PO-mG-PO-fU-PO- | |
| | | mU-PO-fU-PO-mA-PO-fU- | | mG-PO-fC-PO-mC-PO- | |
| | | PO-fC-PO-fA-PO-mA-PO- | | fU-PO-mU-PO-mG-PO- | |
| | | mG-PO-mG-PO-mC-PO-mA- | | mA-PO-fU-PO-mA-PO- | |
| | | PO-mC-PO-mA-PO-mU-PO- | | fA-PO-mC-PO-fU-PO- | |
| | | mA-PO-mC-PS-lT4-PS-lT4 | | mC-PS-dT-PS-dT | |
| 369 | 307 | lgT3-PS-lgT3-PS-lgT3- | 1283 | mG-PS-fU-PS-mA-PO- | 1481 |
| | | PO-mG-PO-mA-PO-mG-PO- | | fU-PO-mG-PO-mU-PO- | |
| | | mU-PO-fU-PO-mA-PO-fU- | | mG-PO-mC-PO-mC-PO- | |
| | | PO-fC-PO-fA-PO-mA-PO- | | mU-PO-mU-PO-mG-PO- | |
| | | mG-PO-mG-PO-mC-PO-mA- | | mA-PO-fU-PO-mA-PO- | |
| | | PO-mC-PO-mA-PO-mU-PO- | | fA-PO-mC-PO-mU-PO- | |
| | | mA-PO-mC-PS-lT4-PS-lT4 | | mC-PS-LA-PS-lA | |
| 370 | 307 | lgT3-PS-lgT3-PS-lgT3- | 1284 | mG-PS-fU-PS-mA-PO- | 1482 |
| | | PO-mG-PO-mA-PO-mG-PO- | | mU-PO-mG-PO-fU-PO- | |
| | | mU-PO-fU-PO-mA-PO-fU- | | mG-PO-mC-PO-mC-PO- | |
| | | PO-fC-PO-fA-PO-mA-PO- | | mU-PO-mU-PO-mG-PO- | |
| | | mG-PO-mG-PO-mC-PO-mA- | | mA-PO-fU-PO-mA-PO- | |
| | | PO-mC-PO-mA-PO-mU-PO- | | fA-PO-mC-PO-mU-PO- | |
| | | mA-PO-mC-PS-lT4-PS-lT4 | | mC-PS-LA-PS-lA | |
| 371 | 307 | lgT3-PS-lgT3-PS-lgT3- | 1285 | mG-PS-fU-PS-mA-PO- | 1483 |
| | | PO-mG-PO-mA-PO-mG-PO- | | fU-PO-mG-PO-mU-PO- | |
| | | mU-PO-fU-PO-mA-PO-fU- | | mG-PO-fC-PO-fC-PO- | |
| | | PO-fC-PO-fA-PO-mA-PO- | | mU-PO-mU-PO-mG-PO- | |
| | | mG-PO-mG-PO-mC-PO-mA- | | mA-PO-fU-PO-mA-PO- | |
| | | PO-mC-PO-mA-PO-mU-PO- | | fA-PO-mC-PO-mU-PO- | |
| | | mA-PO-mC-PS-lT4-PS-lT4 | | mC-PS-LA-PS-lA | |
| 372 | 307 | lgT3-PS-lgT3-PS-lgT3- | 1286 | mG-PS-fU-PS-mA-PO- | 1484 |
| | | PO-mG-PO-mA-PO-mG-PO- | | fU-PO-mG-PO-mU-PO- | |
| | | mU-PO-fU-PO-mA-PO-fU- | | mG-PO-mC-PO-fC-PO- | |
| | | PO-fC-PO-fA-PO-mA-PO- | | mU-PO-mU-PO-mG-PO- | |
| | | mG-PO-mG-PO-mC-PO-mA- | | mA-PO-fU-PO-mA-PO- | |
| | | PO-mC-PO-mA-PO-mU-PO- | | fA-PO-mC-PO-mU-PO- | |
| | | mA-PO-mC-PS-lT4-PS-lT4 | | mC-PS-LA-PS-lA | |
| 373 | 307 | lgT3-PO-lgT3-PO-lgT3- | 1287 | mG-PS-fU-PS-mA-PO- | 1485 |
| | | PO-1G-PO-lA-PO-mG-PO- | | fU-PO-mG-PO-mU-PO- | |
| | | mU-PO-fU-PO-mA-PO-fU- | | mG-PO-mC-PO-mC-PO- | |
| | | PO-fC-PO-fA-PO-mA-PO- | | mU-PO-mU-PO-mG-PO- | |
| | | mG-PO-mG-PO-mC-PO-mA- | | mA-PO-fU-PO-mA-PO- | |
| | | PO-mC-PO-mA-PO-mU-PO- | | fA-PO-mC-PO-mU-PO- | |
| | | mA-PO-mC-PO-lT4-PO-lT4 | | mC-PS-mA-PS-mA | |
| 374 | 307 | lgT3-PO-lgT3-PO-lgT3- | 1288 | mG-PS-fU-PS-mA-PO- | 1486 |
| | | PO-1G-PO-LA-PO-mG-PO- | | mU-PO-mG-PO-fU-PO- | |
| | | mU-PO-fU-PO-mA-PO-fU- | | mG-PO-mC-PO-mC-PO- | |
| | | PO-fC-PO-fA-PO-mA-PO- | | mU-PO-mU-PO-mG-PO- | |
| | | mG-PO-mG-PO-mC-PO-mA- | | mA-PO-fU-PO-mA-PO- | |
| | | PO-mC-PO-mA-PO-mU-PO- | | fA-PO-mC-PO-mU-PO- | |
| | | mA-PO-mC-PO-lT4-PO-lT4 | | mC-PS-mA-PS-mA | |
| 375 | 307 | lgT3-PO-lgT3-PO-lgT3- | 1289 | mG-PS-fU-PS-mA-PO- | 1487 |
| | | PO-1G-PO-lA-PO-mG-PO- | | fU-PO-mG-PO-mU-PO- | |
| | | mU-PO-fU-PO-mA-PO-fU- | | mG-PO-fC-PO-fC-PO- | |
| | | PO-fC-PO-fA-PO-mA-PO- | | mU-PO-mU-PO-mG-PO- | |
| | | mG-PO-mG-PO-mC-PO-mA- | | mA-PO-fU-PO-mA-PO- | |
| | | PO-mC-PO-mA-PO-mU-PO- | | fA-PO-mC-PO-mU-PO- | |
| | | mA-PO-mC-PO-lT4-PO-lT4 | | mC-PS-mA-PS-mA | |
| 376 | 307 | lgT3-PO-lgT3-PO-lgT3- | 1290 | mG-PS-fU-PS-mA-PO- | 1488 |
| | | PO-1G-PO-LA-PO-mG-PO- | | fU-PO-mG-PO-mU-PO- | |
| | | mU-PO-fU-PO-mA-PO-fU- | | mG-PO-mC-PO-fC-PO- | |
| | | PO-fC-PO-fA-PO-mA-PO- | | mU-PO-mU-PO-mG-PO- | |
| | | mG-PO-mG-PO-mC-PO-mA- | | mA-PO-fU-PO-mA-PO- | |
| | | PO-mC-PO-mA-PO-mU-PO- | | fA-PO-mC-PO-mU-PO- | |
| | | mA-PO-mC-PO-lT4-PO-lT4 | | mC-PS-mA-PS-mA | |
| 377 | 307 | lgT3-PO-lgT3-PO-lgT3- | 1291 | fG-PS-fU-PS-mA-PO- | 1489 |
| | | PO-1G-PO-LA-PO-mG-PO- | | fU-PO-mG-PO-fU-PO- | |
| | | mU-PO-fU-PO-mA-PO-fU- | | mG-PO-fC-PO-mC-PO- | |
| | | PO-fC-PO-fA-PO-mA-PO- | | fU-PO-mU-PO-mG-PO- | |
| | | mG-PO-mG-PO-mC-PO-mA- | | mA-PO-fU-PO-mA-PO- | |
| | | PO-mC-PO-mA-PO-mU-PO- | | fA-PO-mC-PO-fU-PO- | |
| | | mA-PO-mC-PO-lT4-PO-lT4 | | mC-PS-dT-PS-dT | |
| 378 | 307 | lgT3-PS-lgT3-PS-lgT3- | 1292 | mG-PS-fU-PS-mA-PO- | 1490 |
| | | PO-1G-PO-LA-PO-mG-PO- | | fU-PO-mG-PO-mU-PO- | |
| | | mU-PO-fU-PO-mA-PO-fU- | | mG-PO-mC-PO-mC-PO- | |
| | | PO-fC-PO-fA-PO-mA-PO- | | mU-PO-mU-PO-mG-PO- | |
| | | mG-PO-mG-PO-mC-PO-mA- | | mA-PO-fU-PO-mA-PO- | |
| | | PO-mC-PO-mA-PO-mU-PO- | | fA-PO-mC-PO-mU-PO- | |
| | | mA-PO-mC-PS-lT4-PS-lT4 | | mC-PS-mA-PS-mA | |
| 379 | 307 | lgT3-PS-lgT3-PS-lgT3- | 1293 | mG-PS-fU-PS-mA-PO- | 1491 |
| | | PO-1G-PO-lA-PO-mG-PO- | | mU-PO-mG-PO-fU-PO- | |
| | | mU-PO-fU-PO-mA-PO-fU- | | mG-PO-mC-PO-mC-PO- | |
| | | PO-fC-PO-fA-PO-mA-PO- | | mU-PO-mU-PO-mG-PO- | |
| | | mG-PO-mG-PO-mC-PO-mA- | | mA-PO-fU-PO-mA-PO- | |
| | | PO-mC-PO-mA-PO-mU-PO- | | fA-PO-mC-PO-mU-PO- | |
| | | mA-PO-mC-PS-lT4-PS-lT4 | | mC-PS-mA-PS-mA | |
| 380 | 307 | lgT3-PS-lgT3-PS-lgT3- | 1294 | mG-PS-fU-PS-mA-PO- | 1492 |
| | | PO-1G-PO-LA-PO-mG-PO- | | fU-PO-mG-PO-mU-PO- | |
| | | mU-PO-fU-PO-mA-PO-fU- | | mG-PO-fC-PO-fC-PO- | |
| | | PO-fC-PO-LA-PO-mA-PO- | | mU-PO-mU-PO-mG-PO- | |
| | | mG-PO-mG-PO-mC-PO-mA- | | mA-PO-fU-PO-mA-PO- | |
| | | PO-mC-PO-mA-PO-mU-PO- | | fA-PO-mC-PO-mU-PO- | |
| | | mA-PO-mC-PS-lT4-PS-lT4 | | mC-PS-mA-PS-mA | |
| 381 | \|307 | lgT3-PS-lgT3-PS-lgT3- | 1295 | mG-PS-fU-PS-mA-PO- | 1493 |
| | | PO-1G-PO-LA-PO-mG-PO- | | fU-PO-mG-PO-mU-PO- | |
| | | mU-PO-fU-PO-mA-PO-fU- | | mG-PO-mC-PO-fC-PO- | |
| | | PO-fC-PO-fA-PO-mA-PO- | | mU-PO-mU-PO-mG-PO- | |
| | | mG-PO-mG-PO-mC-PO-mA- | | mA-PO-fU-PO-mA-PO- | |
| | | PO-mC-PO-mA-PO-mU-PO- | | fA-PO-mC-PO-mU-PO- | |
| | | mA-PO-mC-PS-lT4-PS-lT4 | | mC-PS-mA-PS-mA | |
| 382 | 307 | lgT3-PS-lgT3-PS-lgT3- | 1296 | fG-PS-fU-PS-mA-PO- | 1494 |
| | | PO-1G-PO-lA-PO-mG-PO- | | fU-PO-mG-PO-fU-PO- | |
| | | mU-PO-fU-PO-mA-PO-fU- | | mG-PO-fC-PO-mC-PO- | |
| | | PO-fC-PO-fA-PO-mA-PO- | | fU-PO-mU-PO-mG-PO- | |
| | | mG-PO-mG-PO-mC-PO-mA- | | mA-PO-fU-PO-mA-PO- | |
| | | PO-mC-PO-mA-PO-mU-PO- | | fA-PO-mC-PO-fU-PO- | |
| | | mA-PO-mC-PS-lT4-PS-lT4 | | mC-PS-dT-PS-dT | |
| 383 | 311 | lgT3-PO-lgT3-PO-lgT3- | 1297 | mU-PS-fG-PS-mC-PO- | 1495 |
| | | PO-mG-PO-mG-PO-mA-PO- | | fC-PO-mU-PO-mC-PO- | |
| | | mC-PO-fG-PO-mG-PO-fA- | | mG-PO-mA-PO-mU-PO- | |
| | | PO-fG-PO-fU-PO-mU-PO- | | mA-PO-mA-PO-mC-PO- | |
| | | mA-PO-mU-PO-mC-PO-mG- | | mU-PO-fC-PO-mC-PO- | |
| | | PO-mA-PO-mG-PO-mG-PS- | | fG-PO-mU-PO-mC-PO- | |
| | | mC-PS-mA | | mC-PS-mA-PS-mA | |
| 384 | 311 | lgT3-PO-lgT3-PO-lgT3- | 1298 | mU-PS-fG-PS-mC-PO- | 1496 |
| | | PO-mG-PO-mG-PO-mA-PO- | | mC-PO-mU-PO-fC-PO- | |
| | | mC-PO-fG-PO-mG-PO-fA- | | mG-PO-mA-PO-mU-PO- | |
| | | PO-fG-PO-fU-PO-mU-PO- | | mA-PO-mA-PO-mC-PO- | |
| | | mA-PO-mU-PO-mC-PO-mG- | | mU-PO-fC-PO-mC-PO- | |
| | | PO-mA-PO-mG-PO-mG-PS- | | fG-PO-mU-PO-mC-PO- | |
| | | mC-PS-mA | | mC-PS-mA-PS-mA | |
| 385 | 311 | lgT3-PO-lgT3-PO-lgT3- | 1299 | Hy-mU-PS-fG-PS-mC- | 1497 |
| | | PO-mG-PO-mG-PO-mA-PO- | | PO-fC-PO-mU-PO-mC- | |
| | | mC-PO-fG-PO-mG-PO-fA- | | PO-mG-PO-fA-PO-fU- | |
| | | PO-fG-PO-fU-PO-mU-PO- | | PO-mA-PO-mA-PO-mC- | |
| | | mA-PO-mU-PO-mC-PO-mG- | | PO-mU-PO-fC-PO-mC- | |
| | | PO-mA-PO-mG-PO-mG-PS- | | PO-fG-PO-mU-PO-mC- | |
| | | mC-PS-mA | | PO-mC-PS-mA-PS-mA | |
| 386 | 311 | lgT3-PO-lgT3-PO-lgT3- | 1300 | mU-PS-fG-PS-mC-PO- | 1498 |
| | | PO-mG-PO-mG-PO-mA-PO- | | fC-PO-mU-PO-mC-PO- | |
| | | mC-PO-fG-PO-mG-PO-fA- | | mG-PO-mA-PO-fU-PO- | |
| | | PO-fG-PO-fU-PO-mU-PO- | | mA-PO-mA-PO-mC-PO- | |
| | | mA-PO-mU-PO-mC-PO-mG- | | mU-PO-fC-PO-mC-PO- | |
| | | PO-mA-PO-mG-PO-mG-PS- | | fG-PO-mU-PO-mC-PO- | |
| | | mC-PS-mA | | mC-PS-mA-PS-mA | |
| 387 | 311 | lgT3-PO-lgT3-PO-lgT3- | 1301 | fU-PS-fG-PS-mC-PO- | 1499 |
| | | PO-mG-PO-mG-PO-mA-PO- | | fC-PO-mU-PO-fC-PO- | |
| | | mC-PO-fG-PO-mG-PO-fA- | | mG-PO-fA-PO-mU-PO- | |
| | | PO-fG-PO-fU-PO-mU-PO- | | fA-PO-mA-PO-mC-PO- | |
| | | mA-PO-mU-PO-mC-PO-mG- | | mU-PO-fC-PO-mC-PO- | |
| | | PO-mA-PO-mG-PO-mG-PS- | | fG-PO-mU-PO-fC-PO- | |
| | | mC-PS-mA | | mC-PS-dT-PS-dT | |
| 388 | 311 | lgT3-PO-lgT3-PO-lgT3- | 1302 | mU-PS-fG-PS-mC-PO- | 1500 |
| | | PO-1G-PO-1G-PO-mA-PO- | | fC-PO-mU-PO-mC-PO- | |
| | | mC-PO-fG-PO-mG-PO-fA- | | mG-PO-mA-PO-mU-PO- | |
| | | PO-fG-PO-fU-PO-mU-PO- | | mA-PO-mA-PO-mC-PO- | |
| | | mA-PO-mU-PO-mC-PO-mG- | | mU-PO-fC-PO-mC-PO- | |
| | | PO-mA-PO-mG-PO-mG-PS- | | fG-PO-mU-PO-mC-PO- | |
| | | mC-PS-mA | | mC-PS-mA-PS-mA | |
| 389 | 311 | lgT3-PO-lgT3-PO-lgT3- | 1303 | mU-PS-fG-PS-mC-PO- | 1501 |
| | | PO-1G-PO-1G-PO-mA-PO- | | mC-PO-mU-PO-fC-PO- | |
| | | mC-PO-fG-PO-mG-PO-fA- | | mG-PO-mA-PO-mU-PO- | |
| | | PO-fG-PO-fU-PO-mU-PO- | | mA-PO-mA-PO-mC-PO- | |
| | | mA-PO-mU-PO-mC-PO-mG- | | mU-PO-fC-PO-mC-PO- | |
| | | PO-mA-PO-mG-PO-mG-PS- | | fG-PO-mU-PO-mC-PO- | |
| | | mC-PS-mA | | mC-PS-mA-PS-mA | |
| 390 | 311 | lgT3-PO-lgT3-PO-lgT3- | 1304 | mU-PS-fG-PS-mC-PO- | 1502 |
| | | PO-1G-PO-1G-PO-mA-PO- | | fC-PO-mU-PO-mC-PO- | |
| | | mC-PO-fG-PO-mG-PO-fA- | | mG-PO-fA-PO-fU-PO- | |
| | | PO-fG-PO-fU-PO-mU-PO- | | mA-PO-mA-PO-mC-PO- | |
| | | mA-PO-mU-PO-mC-PO-mG- | | mU-PO-fC-PO-mC-PO- | |
| | | PO-mA-PO-mG-PO-mG-PS- | | fG-PO-mU-PO-mC-PO- | |
| | | mC-PS-mA | | mC-PS-mA-PS-mA | |
| 391 | 311 | lgT3-PO-lgT3-PO-lgT3- | 1305 | mU-PS-fG-PS-mC-PO- | 1503 |
| | | PO-1G-PO-1G-PO-mA-PO- | | fC-PO-mU-PO-mC-PO- | |
| | | mC-PO-fG-PO-mG-PO-fA- | | mG-PO-mA-PO-fU-PO- | |
| | | PO-fG-PO-fU-PO-mU-PO- | | mA-PO-mA-PO-mC-PO- | |
| | | mA-PO-mU-PO-mC-PO-mG- | | mU-PO-fC-PO-mC-PO- | |
| | | PO-mA-PO-mG-PO-mG-PS- | | fG-PO-mU-PO-mC-PO- | |
| | | mC-PS-mA | | mC-PS-mA-PS-mA | |
| 392 | 311 | lgT3-PO-lgT3-PO-lgT3- | 1306 | fU-PS-fG-PS-mC-PO- | 1504 |
| | | PO-1G-PO-1G-PO-mA-PO- | | fC-PO-mU-PO-fC-PO- | |
| | | mC-PO-fG-PO-mG-PO-fA- | | mG-PO-fA-PO-mU-PO- | |
| | | PO-fG-PO-fU-PO-mU-PO- | | fA-PO-mA-PO-mC-PO- | |
| | | mA-PO-mU-PO-mC-PO-mG- | | mU-PO-fC-PO-mC-PO- | |
| | | PO-mA-PO-mG-PO-mG-PS- | | fG-PO-mU-PO-fC-PO- | |
| | | mC-PS-mA | | mC-PS-dT-PS-dT | |
| 393 | 311 | lgT3-PO-lgT3-PO-lgT3- | 1307 | mU-PS-fG-PS-mC-PO- | 1505 |
| | | PO-mG-PO-mG-PO-mA-PO- | | fC-PO-mU-PO-mC-PO- | |
| | | mC-PO-fG-PO-mG-PO-fA- | | mG-PO-mA-PO-mU-PO- | |
| | | PO-fG-PO-fU-PO-mU-PO- | | mA-PO-mA-PO-mC-PO- | |
| | | mA-PO-mU-PO-mC-PO-mG- | | mU-PO-fC-PO-mC-PO- | |
| | | PO-mA-PO-mG-PO-mG-PO- | | fG-PO-mU-PO-mC-PO- | |
| | | lT4-PO-lT4 | | mC-PS-mA-PS-mA | |
| 394 | 311 | lgT3-PO-lgT3-PO-lgT3- | 1308 | mU-PS-fG-PS-mC-PO- | 1506 |
| | | PO-mG-PO-mG-PO-mA-PO- | | mC-PO-mU-PO-fC-PO- | |
| | | mC-PO-fG-PO-mG-PO-fA- | | mG-PO-mA-PO-mU-PO- | |
| | | PO-fG-PO-fU-PO-mU-PO- | | mA-PO-mA-PO-mC-PO- | |
| | | mA-PO-mU-PO-mC-PO-mG- | | mU-PO-fC-PO-mC-PO- | |
| | | PO-mA-PO-mG-PO-mG-PO- | | fG-PO-mU-PO-mC-PO- | |
| | | lT4-PO-lT4 | | mC-PS-mA-PS-mA | |
| 395 | 311 | lgT3-PO-lgT3-PO-lgT3- | 1309 | mU-PS-fG-PS-mC-PO- | 1507 |
| | | PO-mG-PO-mG-PO-mA-PO- | | fC-PO-mU-PO-mC-PO- | |
| | | mC-PO-fG-PO-mG-PO-fA- | | mG-PO-fA-PO-fU-PO- | |
| | | PO-fG-PO-fU-PO-mU-PO- | | mA-PO-mA-PO-mC-PO- | |
| | | mA-PO-mU-PO-mC-PO-mG- | | mU-PO-fC-PO-mC-PO- | |
| | | PO-mA-PO-mG-PO-mG-PO- | | fG-PO-mU-PO-mC-PO- | |
| | | lT4-PO-lT4 | | mC-PS-mA-PS-mA | |
| 396 | 311 | lgT3-PO-lgT3-PO-lgT3- | 1310 | mU-PS-fG-PS-mC-PO- | 1508 |
| | | PO-mG-PO-mG-PO-mA-PO- | | fC-PO-mU-PO-mC-PO- | |
| | | mC-PO-fG-PO-mG-PO-fA- | | mG-PO-mA-PO-fU-PO- | |
| | | PO-fG-PO-fU-PO-mU-PO- | | mA-PO-mA-PO-mC-PO- | |
| | | mA-PO-mU-PO-mC-PO-mG- | | mU-PO-fC-PO-mC-PO- | |
| | | PO-mA-PO-mG-PO-mG-PO- | | fG-PO-mU-PO-mC-PO- | |
| | | lT4-PO-lT4 | | mC-PS-mA-PS-mA | |
| 397 | 311 | lgT3-PO-lgT3-PO-lgT3- | 1311 | fU-PS-fG-PS-mC-PO- | 1509 |
| | | PO-mG-PO-mG-PO-mA-PO- | | fC-PO-mU-PO-fC-PO- | |
| | | mC-PO-fG-PO-mG-PO-fA- | | mG-PO-fA-PO-mU-PO- | |
| | | PO-fG-PO-fU-PO-mU-PO- | | fA-PO-mA-PO-mC-PO- | |
| | | mA-PO-mU-PO-mC-PO-mG- | | mU-PO-fC-PO-mC-PO- | |
| | | PO-mA-PO-mG-PO-mG-PO- | | fG-PO-mU-PO-fC-PO- | |
| | | lT4-PO-lT4 | | mC-PS-dT-PS-dT | |
| 398 | 311 | lgT3-PO-lgT3-PO-lgT3- | 1312 | mU-PS-fG-PS-mC-PO- | 1510 |
| | | PO-mG-PO-mG-PO-mA-PO- | | fC-PO-mU-PO-mC-PO- | |
| | | mC-PO-fG-PO-mG-PO-fA- | | mG-PO-mA-PO-mU-PO- | |
| | | PO-fG-PO-fU-PO-mU-PO- | | mA-PO-mA-PO-mC-PO- | |
| | | mA-PO-mU-PO-mC-PO-mG- | | mU-PO-fC-PO-mC-PO- | |
| | | PO-mA-PO-mG-PO-mG-PO- | | fG-PO-mU-PO-mC-PO- | |
| | | lT4-PO-lT4 | | mC-PS-LA-PS-lA | |
| 399 | 311 | lgT3-PO-lgT3-PO-lgT3- | 1313 | mU-PS-fG-PS-mC-PO- | 1511 |
| | | PO-mG-PO-mG-PO-mA-PO- | | mC-PO-mU-PO-fC-PO- | |
| | | mC-PO-fG-PO-mG-PO-fA- | | mG-PO-mA-PO-mU-PO- | |
| | | PO-fG-PO-fU-PO-mU-PO- | | mA-PO-mA-PO-mC-PO- | |
| | | mA-PO-mU-PO-mC-PO-mG- | | mU-PO-fC-PO-mC-PO- | |
| | | PO-mA-PO-mG-PO-mG-PO- | | fG-PO-mU-PO-mC-PO- | |
| | | lT4-PO-lT4 | | mC-PS-LA-PS-lA | |
| 400 | 311 | lgT3-PO-lgT3-PO-lgT3- | 1314 | mU-PS-fG-PS-mC-PO- | 1512 |
| | | PO-mG-PO-mG-PO-mA-PO- | | fC-PO-mU-PO-mC-PO- | |
| | | mC-PO-fG-PO-mG-PO-fA- | | mG-PO-fA-PO-fU-PO- | |
| | | PO-fG-PO-fU-PO-mU-PO- | | mA-PO-mA-PO-mC-PO- | |
| | | mA-PO-mU-PO-mC-PO-mG- | | mU-PO-fC-PO-mC-PO- | |
| | | PO-mA-PO-mG-PO-mG-PO- | | fG-PO-mU-PO-mC-PO- | |
| | | lT4-PO-lT4 | | mC-PS-LA-PS-lA | |
| 401 | 311 | lgT3-PO-lgT3-PO-lgT3- | 1315 | mU-PS-fG-PS-mC-PO- | 1513 |
| | | PO-mG-PO-mG-PO-mA-PO- | | fC-PO-mU-PO-mC-PO- | |
| | | mC-PO-fG-PO-mG-PO-fA- | | mG-PO-mA-PO-fU-PO- | |
| | | PO-fG-PO-fU-PO-mU-PO- | | mA-PO-mA-PO-mC-PO- | |
| | | mA-PO-mU-PO-mC-PO-mG- | | mU-PO-fC-PO-mC-PO- | |
| | | PO-mA-PO-mG-PO-mG-PO- | | fG-PO-mU-PO-mC-PO- | |
| | | lT4-PO-lT4 | | mC-PS-LA-PS-lA | |
| 402 | 311 | lgT3-PS-lgT3-PS-lgT3- | 1316 | mU-PS-fG-PS-mC-PO- | 1514 |
| | | PO-mG-PO-mG-PO-mA-PO- | | fC-PO-mU-PO-mC-PO- | |
| | | mC-PO-fG-PO-mG-PO-fA- | | mG-PO-mA-PO-mU-PO- | |
| | | PO-fG-PO-fU-PO-mU-PO- | | mA-PO-mA-PO-mC-PO- | |
| | | mA-PO-mU-PO-mC-PO-mG- | | mU-PO-fC-PO-mC-fG- | |
| | | PO-mA-PO-mG-PO-mG-PS- | | PO-mU-PO-mC-PO-mC- | |
| | | lT4-PS-lT4 | | PS-mA-PS-mA | |
| 403 | 311 | lgT3-PS-lgT3-PS-lgT3- | 1317 | mU-PS-fG-PS-mC-PO- | 1515 |
| | | PO-mG-PO-mG-PO-mA-PO- | | mC-PO-mU-PO-fC-PO- | |
| | | mC-PO-fG-PO-mG-PO-fA- | | mG-PO-mA-PO-mU-PO- | |
| | | PO-fG-PO-fU-PO-mU-PO- | | mA-PO-mA-PO-mC-PO- | |
| | | mA-PO-mU-PO-mC-PO-mG- | | mU-PO-fC-PO-mC-PO- | |
| | | PO-mA-PO-mG-PO-mG-PS- | | fG-PO-mU-PO-mC-PO- | |
| | | lT4-PS-lT4 | | mC-PS-mA-PS-mA | |
| 404 | 311 | lgT3-PS-lgT3-PS-lgT3- | 1318 | mU-PS-fG-PS-mC-PO- | 1516 |
| | | PO-mG-PO-mG-PO-mA-PO- | | fC-PO-mU-PO-mC-PO- | |
| | | mC-PO-fG-PO-mG-PO-fA- | | mG-PO-fA-PO-fU-PO- | |
| | | PO-fG-PO-fU-PO-mU-PO- | | mA-PO-mA-PO-mC-PO- | |
| | | mA-PO-mU-PO-mC-PO-mG- | | mU-PO-fC-PO-mC-PO- | |
| | | PO-mA-PO-mG-PO-mG-PS- | | fG-PO-mU-PO-mC-PO- | |
| | | lT4-PS-lT4 | | mC-PS-mA-PS-mA | |
| 405 | 311 | lgT3-PS-lgT3-PS-lgT3- | 1319 | mU-PS-fG-PS-mC-PO- | 1517 |
| | | PO-mG-PO-mG-PO-mA-PO- | | fC-PO-mU-PO-mC-PO- | |
| | | mC-PO-fG-PO-mG-PO-fA- | | mG-PO-mA-PO-fU-PO- | |
| | | PO-fG-PO-fU-PO-mU-PO- | | mA-PO-mA-PO-mC-PO- | |
| | | mA-PO-mU-PO-mC-PO-mG- | | mU-PO-fC-PO-mC-PO- | |
| | | PO-mA-PO-mG-PO-mG-PS- | | fG-PO-mU-PO-mC-PO- | |
| | | lT4-PS-lT4 | | mC-PS-mA-PS-mA | |
| 406 | 311 | lgT3-PS-lgT3-PS-lgT3- | 1320 | fU-PS-fG-PS-mC-PO- | 1518 |
| | | PO-mG-PO-mG-PO-mA-PO- | | fC-PO-mU-PO-fC-PO- | |
| | | mC-PO-fG-PO-mG-PO-fA- | | mG-PO-fA-PO-mU-PO- | |
| | | PO-fG-PO-fU-PO-mU-PO- | | fA-PO-mA-PO-mC-PO- | |
| | | mA-PO-mU-PO-mC-PO-mG- | | mU-PO-fC-PO-mC-PO- | |
| | | PO-mA-PO-mG-PO-mG-PS- | | fG-PO-mU-PO-fC-PO- | |
| | | lT4-PS-lT4 | | mC-PS-dT-PS-dT | |
| 407 | 311 | lgT3-PS-lgT3-PS-lgT3- | 1321 | mU-PS-fG-PS-mC-PO- | 1519 |
| | | PO-mG-PO-mG-PO-mA-PO- | | fC-PO-mU-PO-mC-PO- | |
| | | mC-PO-fG-PO-mG-PO-fA- | | mG-PO-mA-PO-mU-PO- | |
| | | PO-fG-PO-fU-PO-mU-PO- | | mA-PO-mA-PO-mC-PO- | |
| | | mA-PO-mU-PO-mC-PO-mG- | | mU-PO-fC-PO-mC-PO- | |
| | | PO-mA-PO-mG-PO-mG-PS- | | fG-PO-mU-PO-mC-PO- | |
| | | lT4-PS-lT4 | | mC-PS-lA-PS-lA | |
| 408 | 311 | lgT3-PS-lgT3-PS-lgT3- | 1322 | mU-PS-fG-PS-mC-PO- | 1520 |
| | | PO-mG-PO-mG-PO-mA-PO- | | mC-PO-mU-PO-fC-PO- | |
| | | mC-PO-fG-PO-mG-PO-fA- | | mG-PO-mA-PO-mU-PO- | |
| | | PO-fG-PO-fU-PO-mU-PO- | | mA-PO-mA-PO-mC-PO- | |
| | | mA-PO-mU-PO-mC-PO-mG- | | mU-PO-fC-PO-mC-PO- | |
| | | PO-mA-PO-mG-PO-mG-PS- | | fG-PO-mU-PO-mC-PO- | |
| | | lT4-PS-lT4 | | mC-PS-LA-PS-lA | |
| 409 | 311 | lgT3-PS-lgT3-PS-lgT3- | 1323 | mU-PS-fG-PS-mC-PO- | 1521 |
| | | PO-mG-PO-mG-PO-mA-PO- | | fC-PO-mU-PO-mC-PO- | |
| | | mC-PO-fG-PO-mG-PO-fA- | | mG-PO-fA-PO-fU-PO- | |
| | | PO-fG-PO-fU-PO-mU-PO- | | mA-PO-mA-PO-mC-PO- | |
| | | mA-PO-mU-PO-mC-PO-mG- | | mU-PO-fC-PO-mC-PO- | |
| | | PO-mA-PO-mG-PO-mG-PS- | | fG-PO-mU-PO-mC-PO- | |
| | | lT4-PS-lT4 | | mC-PS-lA-PS-lA | |
| 410 | 311 | lgT3-PS-lgT3-PS-lgT3- | 1324 | mU-PS-fG-PS-mC-PO- | 1522 |
| | | PO-mG-PO-mG-PO-mA-PO- | | fC-PO-mU-PO-mC-PO- | |
| | | mC-PO-fG-PO-mG-PO-fA- | | mG-PO-mA-PO-fU-PO- | |
| | | PO-fG-PO-fU-PO-mU-PO- | | mA-PO-mA-PO-mC-PO- | |
| | | mA-PO-mU-PO-mC-PO-mG- | | mU-PO-fC-PO-mC-PO- | |
| | | PO-mA-PO-mG-PO-mG-PS- | | EG-PO-mU-PO-mC-PO- | |
| | | lT4-PS-lT4 | | mC-PS-lA-PS-lA | |
| 411 | 311 | lgT3-PO-lgT3-PO-lgT3- | 1325 | mU-PS-fG-PS-mC-PO- | 1523 |
| | | PO-1G-PO-1G-PO-mA-PO- | | fC-PO-mU-PO-mC-PO- | |
| | | mC-PO-fG-PO-mG-PO-fA- | | mG-PO-mA-PO-mU-PO- | |
| | | PO-fG-PO-fU-PO-mU-PO- | | mA-PO-mA-PO-mC-PO- | |
| | | mA-PO-mU-PO-mC-PO-mG- | | mU-PO-fC-PO-mC-PO- | |
| | | PO-mA-PO-mG-PO-mG-PO- | | fG-PO-mU-PO-mC-PO- | |
| | | lT4-PO-lT4 | | mC-PS-mA-PS-mA | |
| 412 | 311 | lgT3-PO-lgT3-PO-lgT3- | 1326 | mU-PS-fG-PS-mC-PO- | 1524 |
| | | PO-1G-PO-1G-PO-mA-PO- | | mC-PO-mU-PO-fC-PO- | |
| | | mC-PO-fG-PO-mG-PO-fA- | | mG-PO-mA-PO-mU-PO- | |
| | | PO-fG-PO-fU-PO-mU-PO- | | mA-PO-mA-PO-mC-PO- | |
| | | mA-PO-mU-PO-mC-PO-mG- | | mU-PO-fC-PO-mC-PO- | |
| | | PO-mA-PO-mG-PO-mG-PO- | | fG-PO-mU-PO-mC-PO- | |
| | | lT4-PO-lT4 | | mC-PS-mA-PS-mA | |
| 413 | 311 | lgT3-PO-lgT3-PO-lgT3- | 1327 | mU-PS-fG-PS-mC-PO- | 1525 |
| | | PO-1G-PO-1G-PO-mA-PO- | | fC-PO-mU-PO-mC-PO- | |
| | | mC-PO-fG-PO-mG-PO-fA- | | mG-PO-fA-PO-fU-PO- | |
| | | PO-fG-PO-fU-PO-mU-PO- | | mA-PO-mA-PO-mC-PO- | |
| | | mA-PO-mU-PO-mC-PO-mG- | | mU-PO-fC-PO-mC-PO- | |
| | | PO-mA-PO-mG-PO-mG-PO- | | fG-PO-mU-PO-mC-PO- | |
| | | lT4-PO-lT4 | | mC-PS-mA-PS-mA | |
| 414 | 311 | lgT3-PO-lgT3-PO-lgT3- | 1328 | mU-PS-fG-PS-mC-PO- | 1526 |
| | | PO-1G-PO-1G-PO-mA-PO- | | fC-PO-mU-PO-mC-PO- | |
| | | mC-PO-fG-PO-mG-PO-fA- | | mG-PO-mA-PO-fU-PO- | |
| | | PO-fG-PO-fU-PO-mU-PO- | | mA-PO-mA-PO-mC-PO- | |
| | | mA-PO-mU-PO-mC-PO-mG- | | mU-PO-fC-PO-mC-PO- | |
| | | PO-mA-PO-mG-PO-mG-PO- | | fG-PO-mU-PO-mC-PO- | |
| | | lT4-PO-lT4 | | mC-PS-mA-PS-mA | |
| 415 | 311 | lgT3-PO-lgT3-PO-lgT3- | 1329 | fU-PS-fG-PS-mC-PO- | 1527 |
| | | PO-1G-PO-1G-PO-mA-PO- | | fC-PO-mU-PO-fC-PO- | |
| | | mC-PO-fG-PO-mG-PO-fA- | | mG-PO-LA-PO-mU-PO- | |
| | | PO-fG-PO-fU-PO-mU-PO- | | fA-PO-mA-PO-mC-PO- | |
| | | mA-PO-mU-PO-mC-PO-mG- | | mU-PO-fC-PO-mC-PO- | |
| | | PO-mA-PO-mG-PO-mG-PO- | | fG-PO-mU-PO-fC-PO- | |
| | | lT4-PO-lT4 | | mC-PS-dT-PS-dT | |
| 416 | 311 | lgT3-PS-lgT3-PS-lgT3- | 1330 | mU-PS-fG-PS-mC-PO- | 1528 |
| | | PO-1G-PO-1G-PO-mA-PO- | | fC-PO-mU-PO-mC-PO- | |
| | | mC-PO-fG-PO-mG-PO-fA- | | mG-PO-mA-PO-mU-PO- | |
| | | PO-fG-PO-fU-PO-mU-PO- | | mA-PO-mA-PO-mC-PO- | |
| | | mA-PO-mU-PO-mC-PO-mG- | | mU-PO-fC-PO-mC-PO- | |
| | | PO-mA-PO-mG-PO-mG-PS- | | fG-PO-mU-PO-mC-PO- | |
| | | lT4-PS-lT4 | | mC-PS-mA-PS-mA | |
| 417 | 311 | lgT3-PS-lgT3-PS-lgT3- | 1331 | mU-PS-fG-PS-mC-PO- | 1529 |
| | | PO-1G-PO-1G-PO-mA-PO- | | mC-PO-mU-PO-fC-PO- | |
| | | mC-PO-fG-PO-mG-PO-fA- | | mG-PO-mA-PO-mU-PO- | |
| | | PO-fG-PO-fU-PO-mU-PO- | | mA-PO-mA-PO-mC-PO- | |
| | | mA-PO-mU-PO-mC-PO-mG- | | mU-PO-fC-PO-mC-PO- | |
| | | PO-mA-PO-mG-PO-mG-PS- | | fG-PO-mU-PO-mC-PO- | |
| | | lT4-PS-lT4 | | mC-PS-mA-PS-mA | |
| 418 | 311 | lgT3-PS-lgT3-PS-lgT3- | 1332 | mU-PS-fG-PS-mC-PO- | 1530 |
| | | PO-1G-PO-1G-PO-mA-PO- | | fC-PO-mU-PO-mC-PO- | |
| | | mC-PO-fG-PO-mG-PO-fA- | | mG-PO-fA-PO-fU-PO- | |
| | | PO-fG-PO-fU-PO-mU-PO- | | mA-PO-mA-PO-mC-PO- | |
| | | mA-PO-mU-PO-mC-PO-mG- | | mU-PO-fC-PO-mC-PO- | |
| | | PO-mA-PO-mG-PO-mG-PS- | | fG-PO-mU-PO-mC-PO- | |
| | | lT4-PS-lT4 | | mC-PS-mA-PS-mA | |
| 419 | 311 | lgT3-PS-lgT3-PS-lgT3- | 1333 | mU-PS-fG-PS-mC-PO- | 1531 |
| | | PO-1G-PO-1G-PO-mA-PO- | | fC-PO-mU-PO-mC-PO- | |
| | | mC-PO-fG-PO-mG-PO-fA- | | mG-PO-mA-PO-fU-PO- | |
| | | PO-fG-PO-fU-PO-mU-PO- | | mA-PO-mA-PO-mC-PO- | |
| | | mA-PO-mU-PO-mC-PO-mG- | | mU-PO-fC-PO-mC-PO- | |
| | | PO-mA-PO-mG-PO-mG-PS- | | fG-PO-mU-PO-mC-PO- | |
| | | lT4-PS-lT4 | | mC-PS-mA-PS-mA | |
| 420 | 311 | lgT3-PS-lgT3-PS-lgT3- | 1334 | fU-PS-fG-PS-mC-PO- | 1532 |
| | | PO-1G-PO-1G-PO-mA-PO- | | fC-PO-mU-PO-fC-PO- | |
| | | mC-PO-fG-PO-mG-PO-fA- | | mG-PO-fA-PO-mU-PO- | |
| | | PO-fG-PO-fU-PO-mU-PO- | | fA-PO-mA-PO-mC-PO- | |
| | | mA-PO-mU-PO-mC-PO-mG- | | mU-PO-fC-PO-mC-PO- | |
| | | PO-mA-PO-mG-PO-mG-PS- | | fG-PO-mU-PO-fC-PO- | |
| | | lT4-PS-lT4 | | mC-PS-dT-PS-dT | |
| 421 | 311 | lgT3-PO-lgT3-PO-lgT3- | 1335 | mU-PS-fG-PS-mC-PO- | 1533 |
| | | PO-mG-PO-mG-PO-mA-PO- | | fC-PO-mU-PO-mC-PO- | |
| | | mC-PO-fG-PO-mG-PO-fA- | | mG-PO-mA-PO-mU-PO- | |
| | | PO-fG-PO-fU-PO-mU-PO- | | mA-PO-mA-PO-mC-PO- | |
| | | mA-PO-mU-PO-mC-PO-mG- | | mU-PO-fC-PO-mC-PO- | |
| | | PO-mA-PO-mG-PO-mG-PO- | | fG-PO-mU-PO-mC-PO- | |
| | | mC-PO-mA-PO-lT4-PO-lT4 | | mC-PS-mA-PS-mA | |
| 422 | 311 | lgT3-PO-lgT3-PO-lgT3- | 1336 | mU-PS-fG-PS-mC-PO- | 1534 |
| | | PO-mG-PO-mG-PO-mA-PO- | | mC-PO-mU-PO-fC-PO- | |
| | | mC-PO-fG-PO-mG-PO-fA- | | mG-PO-mA-PO-mU-PO- | |
| | | PO-fG-PO-fU-PO-mU-PO- | | mA-PO-mA-PO-mC-PO- | |
| | | mA-PO-mU-PO-mC-PO-mG- | | mU-PO-fC-PO-mC-PO- | |
| | | PO-mA-PO-mG-PO-mG-PO- | | fG-PO-mU-PO-mC-PO- | |
| | | mC-PO-mA-PO-lT4-PO-lT4 | | mC-PS-mA-PS-mA | |
| 423 | 311 | lgT3-PO-lgT3-PO-lgT3- | 1337 | mU-PS-fG-PS-mC-PO- | 1535 |
| | | PO-mG-PO-mG-PO-mA-PO- | | fC-PO-mU-PO-mC-PO- | |
| | | mC-PO-fG-PO-mG-PO-fA- | | mG-PO-LA-PO-fU-PO- | |
| | | PO-fG-PO-fU-PO-mU-PO- | | mA-PO-mA-PO-mC-PO- | |
| | | mA-PO-mU-PO-mC-PO-mG- | | mU-PO-fC-PO-mC-PO- | |
| | | PO-mA-PO-mG-PO-mG-PO- | | fG-PO-mU-PO-mC-PO- | |
| | | mC-PO-mA-PO-lT4-PO-lT4 | | mC-PS-mA-PS-mA | |
| 424 | 311 | lgT3-PO-lgT3-PO-lgT3- | 1338 | mU-PS-fG-PS-mC-PO- | 1536 |
| | | PO-mG-PO-mG-PO-mA-PO- | | fC-PO-mU-PO-mC-PO- | |
| | | mC-PO-fG-PO-mG-PO-fA- | | mG-PO-mA-PO-fU-PO- | |
| | | PO-fG-PO-fU-PO-mU-PO- | | mA-PO-mA-PO-mC-PO- | |
| | | mA-PO-mU-PO-mC-PO-mG- | | mU-PO-fC-PO-mC-PO- | |
| | | PO-mA-PO-mG-PO-mG-PO- | | fG-PO-mU-PO-mC-PO- | |
| | | mC-PO-mA-PO-lT4-PO-lT4 | | mC-PS-mA-PS-mA | |
| 425 | 311 | lgT3-PO-lgT3-PO-lgT3- | 1339 | fU-PS-fG-PS-mC-PO- | 1537 |
| | | PO-mG-PO-mG-PO-mA-PO- | | fC-PO-mU-PO-fC-PO- | |
| | | mC-PO-fG-PO-mG-PO-fA- | | mG-PO-fA-PO-mU-PO- | |
| | | PO-fG-PO-fU-PO-mU-PO- | | fA-PO-mA-PO-mC-PO- | |
| | | mA-PO-mU-PO-mC-PO-mG- | | mU-PO-fC-PO-mC-PO- | |
| | | PO-mA-PO-mG-PO-mG-PO- | | fG-PO-mU-PO-fC-PO- | |
| | | mC-PO-mA-PO-lT4-PO-lT4 | | mC-PS-dT-PS-dT | |
| 426 | 311 | lgT3-PO-lgT3-PO-lgT3- | 1340 | mU-PS-fG-PS-mC-PO- | 1538 |
| | | PO-mG-PO-mG-PO-mA-PO- | | fC-PO-mU-PO-mC-PO- | |
| | | mC-PO-fG-PO-mG-PO-fA- | | mG-PO-mA-PO-mU-PO- | |
| | | PO-fG-PO-fU-PO-mU-PO- | | mA-PO-mA-PO-mC-PO- | |
| | | mA-PO-mU-PO-mC-PO-mG- | | mU-PO-fC-PO-mC-PO- | |
| | | PO-mA-PO-mG-PO-mG-PO- | | fG-PO-mU-PO-mC-PO- | |
| | | mC-PO-mA-PO-lT4-PO-lT4 | | mC-PS-lA-PS-lA | |
| 427 | 311 | lgT3-PO-lgT3-PO-lgT3- | 1341 | mU-PS-fG-PS-mC-PO- | 1539 |
| | | PO-mG-PO-mG-PO-mA-PO- | | mC-PO-mU-PO-fC-PO- | |
| | | mC-PO-fG-PO-mG-PO-fA- | | mG-PO-mA-PO-mU-PO- | |
| | | PO-fG-PO-fU-PO-mU-PO- | | mA-PO-mA-PO-mC-PO- | |
| | | mA-PO-mU-PO-mC-PO-mG- | | mU-PO-fC-PO-mC-PO- | |
| | | PO-mA-PO-mG-PO-mG-PO- | | fG-PO-mU-PO-mC-PO- | |
| | | mC-PO-mA-PO-lT4-PO-lT4 | | mC-PS-LA-PS-LA | |
| 428 | 311 | lgT3-PO-lgT3-PO-lgT3- | 1342 | mU-PS-fG-PS-mC-PO- | 1540 |
| | | PO-mG-PO-mG-PO-mA-PO- | | fC-PO-mU-PO-mC-PO- | |
| | | mC-PO-fG-PO-mG-PO-fA- | | mG-PO-fA-PO-fU-PO- | |
| | | PO-fG-PO-fU-PO-mU-PO- | | mA-PO-mA-PO-mC-PO- | |
| | | mA-PO-mU-PO-mC-PO-mG- | | mU-PO-fC-PO-mC-PO- | |
| | | PO-mA-PO-mG-PO-mG-PO- | | fG-PO-mU-PO-mC-PO- | |
| | | mC-PO-mA-PO-lT4-PO-lT4 | | mC-PS-LA-PS-lA | |
| 429 | 311 | lgT3-PO-lgT3-PO-lgT3- | 1343 | mU-PS-fG-PS-mC-PO- | 1541 |
| | | PO-mG-PO-mG-PO-mA-PO- | | fC-PO-mU-PO-mC-PO- | |
| | | mC-PO-fG-PO-mG-PO-fA- | | mG-PO-mA-PO-fU-PO- | |
| | | PO-fG-PO-fU-PO-mU-PO- | | mA-PO-mA-PO-mC-PO- | |
| | | mA-PO-mU-PO-mC-PO-mG- | | mU-PO-fC-PO-mC-PO- | |
| | | PO-mA-PO-mG-PO-mG-PO- | | fG-PO-mU-PO-mC-PO- | |
| | | mC-PO-mA-PO-lT4-PO-lT4 | | mC-PS-LA-PS-lA | |
| 430 | 311 | lgT3-PS-lgT3-PS-lgT3- | 1344 | mU-PS-fG-PS-mC-PO- | 1542 |
| | | PO-mG-PO-mG-PO-mA-PO- | | fC-PO-mU-PO-mC-PO- | |
| | | mC-PO-fG-PO-mG-PO-fA- | | mG-PO-mA-PO-mU-PO- | |
| | | PO-fG-PO-fU-PO-mU-PO- | | mA-PO-mA-PO-mC-PO- | |
| | | mA-PO-mU-PO-mC-PO-mG- | | mU-PO-fC-PO-mC-PO- | |
| | | PO-mA-PO-mG-PO-mG-PO- | | fG-PO-mU-PO-mC-PO- | |
| | | mC-PO-mA-PS-lT4-PS-lT4 | | mC-PS-mA-PS-mA | |
| 431 | 311 | lgT3-PS-lgT3-PS-lgT3- | 1345 | mU-PS-fG-PS-mC-PO- | 1543 |
| | | PO-mG-PO-mG-PO-mA-PO- | | mC-PO-mU-PO-fC-PO- | |
| | | mC-PO-fG-PO-mG-PO-fA- | | mG-PO-mA-PO-mU-PO- | |
| | | PO-fG-PO-fU-PO-mU-PO- | | mA-PO-mA-PO-mC-PO- | |
| | | mA-PO-mU-PO-mC-PO-mG- | | mU-PO-fC-PO-mC-PO- | |
| | | PO-mA-PO-mG-PO-mG-PO- | | fG-PO-mU-PO-mC-PO- | |
| | | mC-PO-mA-PS-lT4-PS-lT4 | | mC-PS-mA-PS-mA | |
| 432 | 311 | lgT3-PS-lgT3-PS-lgT3- | 1346 | mU-PS-fG-PS-mC-PO- | 1544 |
| | | PO-mG-PO-mG-PO-mA-PO- | | fC-PO-mU-PO-mC-PO- | |
| | | mC-PO-fG-PO-mG-PO-fA- | | mG-PO-fA-PO-fU-PO- | |
| | | PO-fG-PO-fU-PO-mU-PO- | | mA-PO-mA-PO-mC-PO- | |
| | | mA-PO-mU-PO-mC-PO-mG- | | mU-PO-fC-PO-mC-PO- | |
| | | PO-mA-PO-mG-PO-mG-PO- | | fG-PO-mU-PO-mC-PO- | |
| | | mC-PO-mA-PS-lT4-PS-lT4 | | mC-PS-mA-PS-mA | |
| 433 | 311 | lgT3-PS-lgT3-PS-lgT3- | 1347 | mU-PS-fG-PS-mC-PO- | 1545 |
| | | PO-mG-PO-mG-PO-mA-PO- | | fC-PO-mU-PO-mC-PO- | |
| | | mC-PO-fG-PO-mG-PO-fA- | | mG-PO-mA-PO-fU-PO- | |
| | | PO-fG-PO-fU-PO-mU-PO- | | mA-PO-mA-PO-mC-PO- | |
| | | mA-PO-mU-PO-mC-PO-mG- | | mU-PO-fC-PO-mC-PO- | |
| | | PO-mA-PO-mG-PO-mG-PO- | | fG-PO-mU-PO-mC-PO- | |
| | | mC-PO-mA-PS-lT4-PS-lT4 | | mC-PS-mA-PS-mA | |
| 434 | 311 | lgT3-PS-lgT3-PS-lgT3- | 1348 | fU-PS-fG-PS-mC-PO- | 1546 |
| | | PO-mG-PO-mG-PO-mA-PO- | | fC-PO-mU-PO-fC-PO- | |
| | | mC-PO-fG-PO-mG-PO-fA- | | mG-PO-fA-PO-mU-PO- | |
| | | PO-fG-PO-fU-PO-mU-PO- | | fA-PO-mA-PO-mC-PO- | |
| | | mA-PO-mU-PO-mC-PO-mG- | | mU-PO-fC-PO-mC-PO- | |
| | | PO-mA-PO-mG-PO-mG-PO- | | fG-PO-mU-PO-fC-PO- | |
| | | mC-PO-mA-PS-lT4-PS-lT4 | | mC-PS-dT-PS-dT | |
| 435 | 311 | lgT3-PS-lgT3-PS-lgT3- | 1349 | mU-PS-fG-PS-mC-PO- | 1547 |
| | | PO-mG-PO-mG-PO-mA-PO- | | fC-PO-mU-PO-mC-PO- | |
| | | mC-PO-fG-PO-mG-PO-fA- | | mG-PO-mA-PO-mU-PO- | |
| | | PO-fG-PO-fU-PO-mU-PO- | | mA-PO-mA-PO-mC-PO- | |
| | | mA-PO-mU-PO-mC-PO-mG- | | mU-PO-fC-PO-mC-PO- | |
| | | PO-mA-PO-mG-PO-mG-PO- | | fG-PO-mU-PO-mC-PO- | |
| | | mC-PO-mA-PS-lT4-PS-lT4 | | mC-PS-LA-PS-lA | |
| 436 | 311 | lgT3-PS-lgT3-PS-lgT3- | \|1350 | mU-PS-fG-PS-mC-PO- | 1548 |
| | | PO-mG-PO-mG-PO-mA-PO- | | mC-PO-mU-PO-fC-PO- | |
| | | mC-PO-fG-PO-mG-PO-fA- | | mG-PO-mA-PO-mU-PO- | |
| | | PO-fG-PO-fU-PO-mU-PO- | | mA-PO-mA-PO-mC-PO- | |
| | | mA-PO-mU-PO-mC-PO-mG- | | mU-PO-fC-PO-mC-PO- | |
| | | PO-mA-PO-mG-PO-mG-PO- | | fG-PO-mU-PO-mC-PO- | |
| | | mC-PO-mA-PS-lT4-PS-lT4 | | mC-PS-LA-PS-lA | |
| 437 | 311 | lgT3-PS-lgT3-PS-lgT3- | 1351 | mU-PS-fG-PS-mC-PO- | 1549 |
| | | PO-mG-PO-mG-PO-mA-PO- | | fC-PO-mU-PO-mC-PO- | |
| | | mC-PO-fG-PO-mG-PO-fA- | | mG-PO-fA-PO-fU-PO- | |
| | | PO-fG-PO-fU-PO-mU-PO- | | mA-PO-mA-PO-mC-PO- | |
| | | mA-PO-mU-PO-mC-PO-mG- | | mU-PO-fC-PO-mC-PO- | |
| | | PO-mA-PO-mG-PO-mG-PO- | | fG-PO-mU-PO-mC-PO- | |
| | | mC-PO-mA-PS-lT4-PS-lT4 | | mC-PS-LA-PS-lA | |
| 438 | 311 | lgT3-PS-lgT3-PS-lgT3- | 1352 | mU-PS-fG-PS-mC-PO- | 1550 |
| | | PO-mG-PO-mG-PO-mA-PO- | | fC-PO-mU-PO-mC-PO- | |
| | | mC-PO-fG-PO-mG-PO-fA- | | mG-PO-mA-PO-fU-PO- | |
| | | PO-fG-PO-fU-PO-mU-PO- | | mA-PO-mA-PO-mC-PO- | |
| | | mA-PO-mU-PO-mC-PO-mG- | | mU-PO-fC-PO-mC-PO- | |
| | | PO-mA-PO-mG-PO-mG-PO- | | fG-PO-mU-PO-mC-PO- | |
| | | mC-PO-mA-PS-lT4-PS-lT4 | | mC-PS-LA-PS-LA | |
| 439 | 311 | lgT3-PO-lgT3-PO-lgT3- | 1353 | mU-PS-fG-PS-mC-PO- | 1551 |
| | | PO-1G-PO-1G-PO-mA-PO- | | fC-PO-mU-PO-mC-PO- | |
| | | mC-PO-fG-PO-mG-PO-fA- | | mG-PO-mA-PO-mU-PO- | |
| | | PO-fG-PO-fU-PO-mU-PO- | | mA-PO-mA-PO-mC-PO- | |
| | | mA-PO-mU-PO-mC-PO-mG- | | mU-PO-fC-PO-mC-PO- | |
| | | PO-mA-PO-mG-PO-mG-PO- | | fG-PO-mU-PO-mC-PO- | |
| | | mC-PO-mA-PO-lT4-PO-lT4 | | mC-PS-mA-PS-mA | |
| 440 | 311 | lgT3-PO-lgT3-PO-lgT3- | 1354 | mU-PS-fG-PS-mC-PO- | 1552 |
| | | PO-1G-PO-1G-PO-mA-PO- | | mC-PO-mU-PO-fC-PO- | |
| | | mC-PO-fG-PO-mG-PO-fA- | | mG-PO-mA-PO-mU-PO- | |
| | | PO-fG-PO-fU-PO-mU-PO- | | mA-PO-mA-PO-mC-PO- | |
| | | mA-PO-mU-PO-mC-PO-mG- | | mU-PO-fC-PO-mC-PO- | |
| | | PO-mA-PO-mG-PO-mG-PO- | | fG-PO-mU-PO-mC-PO- | |
| | | mC-PO-mA-PO-lT4-PO-lT4 | | mC-PS-mA-PS-mA | |
| 441 | 311 | lgT3-PO-lgT3-PO-lgT3- | 1355 | mU-PS-fG-PS-mC-PO- | 1553 |
| | | PO-1G-PO-1G-PO-mA-PO- | | fC-PO-mU-PO-mC-PO- | |
| | | mC-PO-fG-PO-mG-PO-fA- | | mG-PO-fA-PO-fU-PO- | |
| | | PO-fG-PO-fU-PO-mU-PO- | | mA-PO-mA-PO-mC-PO- | |
| | | mA-PO-mU-PO-mC-PO-mG- | | mU-PO-fC-PO-mC-PO- | |
| | | PO-mA-PO-mG-PO-mG-PO- | | fG-PO-mU-PO-mC-PO- | |
| | | mC-PO-mA-PO-lT4-PO-lT4 | | mC-PS-mA-PS-mA | |
| 442 | 311 | lgT3-PO-lgT3-PO-lgT3- | 1356 | mU-PS-fG-PS-mC-PO- | 1554 |
| | | PO-1G-PO-1G-PO-mA-PO- | | fC-PO-mU-PO-mC-PO- | |
| | | mC-PO-fG-PO-mG-PO-fA- | | mG-PO-mA-PO-fU-PO- | |
| | | PO-fG-PO-fU-PO-mU-PO- | | mA-PO-mA-PO-mC-PO- | |
| | | mA-PO-mU-PO-mC-PO-mG- | | mU-PO-fC-PO-mC-PO- | |
| | | PO-mA-PO-mG-PO-mG-PO- | | fG-PO-mU-PO-mC-PO- | |
| | | mC-PO-mA-PO-lT4-PO-lT4 | | mC-PS-mA-PS-mA | |
| 443 | 311 | lgT3-PO-lgT3-PO-lgT3- | 1357 | fU-PS-fG-PS-mC-PO- | 1555 |
| | | PO-1G-PO-1G-PO-mA-PO- | | fC-PO-mU-PO-fC-PO- | |
| | | mC-PO-fG-PO-mG-PO-fA- | | mG-PO-LA-PO-mU-PO- | |
| | | PO-fG-PO-fU-PO-mU-PO- | | fA-PO-mA-PO-mC-PO- | |
| | | mA-PO-mU-PO-mC-PO-mG- | | mU-PO-fC-PO-mC-PO- | |
| | | PO-mA-PO-mG-PO-mG-PO- | | fG-PO-mU-PO-fC-PO- | |
| | | mC-PO-mA-PO-lT4-PO-lT4 | | mC-PS-dT-PS-dT | |
| 444 | 311 | lgT3-PS-lgT3-PS-lgT3- | 1358 | mU-PS-fG-PS-mC-PO- | 1556 |
| | | PO-1G-PO-1G-PO-mA-PO- | | fC-PO-mU-PO-mC-PO- | |
| | | mC-PO-fG-PO-mG-PO-fA- | | mG-PO-mA-PO-mU-PO- | |
| | | PO-fG-PO-fU-PO-mU-PO- | | mA-PO-mA-PO-mC-PO- | |
| | | mA-PO-mU-PO-mC-PO-mG- | | mU-PO-fC-PO-mC-PO- | |
| | | PO-mA-PO-mG-PO-mG-PO- | | fG-PO-mU-PO-mC-PO- | |
| | | mC-PO-mA-PS-lT4-PS-lT4 | | mC-PS-mA-PS-mA | |
| 445 | 311 | lgT3-PS-lgT3-PS-lgT3- | 1359 | mU-PS-fG-PS-mC-PO- | 1557 |
| | | PO-1G-PO-1G-PO-mA-PO- | | mC-PO-mU-PO-fC-PO- | |
| | | mC-PO-fG-PO-mG-PO-fA- | | mG-PO-mA-PO-mU-PO- | |
| | | PO-fG-PO-fU-PO-mU-PO- | | mA-PO-mA-PO-mC-PO- | |
| | | mA-PO-mU-PO-mC-PO-mG- | | mU-PO-fC-PO-mC-PO- | |
| | | PO-mA-PO-mG-PO-mG-PO- | | fG-PO-mU-PO-mC-PO- | |
| | | mC-PO-mA-PS-lT4-PS-lT4 | | mC-PS-mA-PS-mA | |
| 446 | 311 | lgT3-PS-lgT3-PS-lgT3- | 1360 | mU-PS-fG-PS-mC-PO- | 1558 |
| | | PO-1G-PO-1G-PO-mA-PO- | | fC-PO-mU-PO-mC-PO- | |
| | | mC-PO-fG-PO-mG-PO-fA- | | mG-PO-fA-PO-fU-PO- | |
| | | PO-fG-PO-fU-PO-mU-PO- | | mA-PO-mA-PO-mC-PO- | |
| | | mA-PO-mU-PO-mC-PO-mG- | | mU-PO-fC-PO-mC-PO- | |
| | | PO-mA-PO-mG-PO-mG-PO- | | fG-PO-mU-PO-mC-PO- | |
| | | mC-PO-mA-PS-lT4-PS-lT4 | | mC-PS-mA-PS-mA | |
| 447 | 311 | lgT3-PS-lgT3-PS-lgT3- | 1361 | mU-PS-fG-PS-mC-PO- | 1559 |
| | | PO-1G-PO-1G-PO-mA-PO- | | fC-PO-mU-PO-mC-PO- | |
| | | mC-PO-fG-PO-mG-PO-fA- | | mG-PO-mA-PO-fU-PO- | |
| | | PO-fG-PO-fU-PO-mU-PO- | | mA-PO-mA-PO-mC-PO- | |
| | | mA-PO-mU-PO-mC-PO-mG- | | mU-PO-fC-PO-mC-PO- | |
| | | PO-mA-PO-mG-PO-mG-PO- | | fG-PO-mU-PO-mC-PO- | |
| | | mC-PO-mA-PS-lT4-PS-lT4 | | mC-PS-mA-PS-mA | |
| 448 | 311 | lgT3-PS-lgT3-PS-lgT3- | 1362 | fU-PS-fG-PS-mC-PO- | 1560 |
| | | PO-1G-PO-1G-PO-mA-PO- | | fC-PO-mU-PO-fC-PO- | |
| | | mC-PO-fG-PO-mG-PO-fA- | | mG-PO-fA-PO-mU-PO- | |
| | | PO-fG-PO-fU-PO-mU-PO- | | fA-PO-mA-PO-mC-PO- | |
| | | mA-PO-mU-PO-mC-PO-mG- | | mU-PO-fC-PO-mC-PO- | |
| | | PO-mA-PO-mG-PO-mG-PO- | | fG-PO-mU-PO-fC-PO- | |
| | | mC-PO-mA-PS-lT4-PS-lT4 | | mC-PS-dT-PS-dT | |
| 449 | 314 | lgT3-PO-lgT3-PO-lgT3- | 1363 | mG-PS-fU-PS-mG-PO- | 1561 |
| | | PO-mG-PO-mC-PO-mC-PO- | | fC-PO-mC-PO-mU-PO- | |
| | | mA-PO-fG-PO-mA-PO-fG- | | mC-PO-mG-PO-mA-PO- | |
| | | PO-fU-PO-fU-PO-mA-PO- | | mU-PO-mA-PO-mA-PO- | |
| | | mU-PO-mC-PO-mG-PO-mA- | | mC-PO-fU-PO-mC-PO- | |
| | | PO-mG-PO-mG-PO-mC-PS- | | fU-PO-mG-PO-mG-PO- | |
| | | mA-PS-mC | | mC-PS-mA-PS-mA | |
| 450 | 314 | lgT3-PO-lgT3-PO-lgT3- | 1364 | mG-PS-fU-PS-mG-PO- | 1562 |
| | | PO-mG-PO-mC-PO-mC-PO- | | mC-PO-mC-PO-fU-PO- | |
| | | mA-PO-fG-PO-mA-PO-fG- | | mC-PO-mG-PO-mA-PO- | |
| | | PO-fU-PO-fU-PO-mA-PO- | | mU-PO-mA-PO-mA-PO- | |
| | | mU-PO-mC-PO-mG-PO-mA- | | mC-PO-fU-PO-mC-PO- | |
| | | PO-mG-PO-mG-PO-mC-PS- | | fU-PO-mG-PO-mG-PO- | |
| | | mA-PS-mC | | mC-PS-mA-PS-mA | |
| 451 | 314 | lgT3-PO-lgT3-PO-lgT3- | 1365 | mG-PS-fU-PS-mG-PO- | 1563 |
| | | PO-mG-PO-mC-PO-mC-PO- | | fC-PO-mC-PO-mU-PO- | |
| | | mA-PO-fG-PO-mA-PO-fG- | | mC-PO-fG-PO-fA-PO- | |
| | | PO-fU-PO-fU-PO-mA-PO- | | mU-PO-mA-PO-mA-PO- | |
| | | mU-PO-mC-PO-mG-PO-mA- | | mC-PO-fU-PO-mC-PO- | |
| | | PO-mG-PO-mG-PO-mC-PS- | | fU-PO-mG-PO-mG-PO- | |
| | | mA-PS-mC | | mC-PS-mA-PS-mA | |
| 452 | 314 | lgT3-PO-lgT3-PO-lgT3- | 1366 | mG-PS-fU-PS-mG-PO- | 1564 |
| | | PO-mG-PO-mC-PO-mC-PO- | | fC-PO-mC-PO-mU-PO- | |
| | | mA-PO-fG-PO-mA-PO-fG- | | mC-PO-mG-PO-fA-PO- | |
| | | PO-fU-PO-fU-PO-mA-PO- | | mU-PO-mA-PO-mA-PO- | |
| | | mU-PO-mC-PO-mG-PO-mA- | | mC-PO-fU-PO-mC-PO- | |
| | | PO-mG-PO-mG-PO-mC-PS- | | fU-PO-mG-PO-mG-PO- | |
| | | mA-PS-mC | | mC-PS-mA-PS-mA | |
| 453 | 314 | lgT3-PO-lgT3-PO-lgT3- | 1367 | fG-PS-fU-PS-mG-PO- | 1565 |
| | | PO-mG-PO-mC-PO-mC-PO- | | fC-PO-mC-PO-fU-PO- | |
| | | mA-PO-fG-PO-mA-PO-fG- | | mC-PO-fG-PO-mA-PO- | |
| | | PO-fU-PO-fU-PO-mA-PO- | | fU-PO-mA-PO-mA-PO- | |
| | | mU-PO-mC-PO-mG-PO-mA- | | mC-PO-fU-PO-mC-PO- | |
| | | PO-mG-PO-mG-PO-mC-PS- | | fU-PO-mG-PO-fG-PO- | |
| | | mA-PS-mC | | mC-PS-dT-PS-dT | |
| 454 | 314 | lgT3-PO-lgT3-PO-lgT3- | 1368 | mG-PS-fU-PS-mG-PO- | 1566 |
| | | PO-1G-PO-1C-PO-mC-PO- | | fC-PO-mC-PO-mU-PO- | |
| | | mA-PO-fG-PO-mA-PO-fG- | | mC-PO-mG-PO-mA-PO- | |
| | | PO-fU-PO-fU-PO-mA-PO- | | mU-PO-mA-PO-mA-PO- | |
| | | mU-PO-mC-PO-mG-PO-mA- | | mC-PO-fU-PO-mC-PO- | |
| | | PO-mG-PO-mG-PO-mC-PS- | | fU-PO-mG-PO-mG-PO- | |
| | | mA-PS-mC | | mC-PS-mA-PS-mA | |
| 455 | 314 | lgT3-PO-lgT3-PO-lgT3- | 1369 | mG-PS-fU-PS-mG-PO- | 1567 |
| | | PO-1G-PO-1C-PO-mC-PO- | | mC-PO-mC-PO-fU-PO- | |
| | | mA-PO-fG-PO-mA-PO-fG- | | mC-PO-mG-PO-mA-PO- | |
| | | PO-fU-PO-fU-PO-mA-PO- | | mU-PO-mA-PO-mA-PO- | |
| | | mU-PO-mC-PO-mG-PO-mA- | | mC-PO-fU-PO-mC-PO- | |
| | | PO-mG-PO-mG-PO-mC-PS- | | fU-PO-mG-PO-mG-PO- | |
| | | mA-PS-mC | | mC-PS-mA-PS-mA | |
| 456 | 314 | lgT3-PO-lgT3-PO-lgT3- | 1370 | mG-PS-fU-PS-mG-PO- | 1568 |
| | | PO-1G-PO-1C-PO-mC-PO- | | fC-PO-mC-PO-mU-PO- | |
| | | mA-PO-fG-PO-mA-PO-fG- | | mC-PO-fG-PO-LA-PO- | |
| | | PO-fU-PO-fU-PO-mA-PO- | | mU-PO-mA-PO-mA-PO- | |
| | | mU-PO-mC-PO-mG-PO-mA- | | mC-PO-fU-PO-mC-PO- | |
| | | PO-mG-PO-mG-PO-mC-PS- | | fU-PO-mG-PO-mG-PO- | |
| | | mA-PS-mC | | mC-PS-mA-PS-mA | |
| 457 | 314 | lgT3-PO-lgT3-PO-lgT3- | 1371 | mG-PS-fU-PS-mG-PO- | 1569 |
| | | PO-1G-PO-1C-PO-mC-PO- | | fC-PO-mC-PO-mU-PO- | |
| | | mA-PO-fG-PO-mA-PO-fG- | | mC-PO-mG-PO-fA-PO- | |
| | | PO-fU-PO-fU-PO-mA-PO- | | mU-PO-mA-PO-mA-PO- | |
| | | mU-PO-mC-PO-mG-PO-mA- | | mC-PO-fU-PO-mC-PO- | |
| | | PO-mG-PO-mG-PO-mC-PS- | | fU-PO-mG-PO-mG-PO- | |
| | | mA-PS-mC | | mC-PS-mA-PS-mA | |
| 458 | 314 | lgT3-PO-lgT3-PO-lgT3- | 1372 | fG-PS-fU-PS-mG-PO- | 1570 |
| | | PO-1G-PO-1C-PO-mC-PO- | | fC-PO-mC-PO-fU-PO- | |
| | | mA-PO-fG-PO-mA-PO-fG- | | mC-PO-fG-PO-mA-PO- | |
| | | PO-fU-PO-fU-PO-mA-PO- | | fU-PO-mA-PO-mA-PO- | |
| | | mU-PO-mC-PO-mG-PO-mA- | | mC-PO-fU-PO-mC-PO- | |
| | | PO-mG-PO-mG-PO-mC-PS- | | fU-PO-mG-PO-fG-PO- | |
| | | mA-PS-mC | | mC-PS-dT-PS-dT | |
| 459 | 314 | lgT3-PO-lgT3-PO-lgT3- | 1373 | mG-PS-fU-PS-mG-PO- | 1571 |
| | | PO-mG-PO-mC-PO-mC-PO- | | fC-PO-mC-PO-mU-PO- | |
| | | mA-PO-fG-PO-mA-PO-fG- | | mC-PO-mG-PO-mA-PO- | |
| | | PO-fU-PO-fU-PO-mA-PO- | | mU-PO-mA-PO-mA-PO- | |
| | | mU-PO-mC-PO-mG-PO-mA- | | mC-PO-fU-PO-mC-PO- | |
| | | PO-mG-PO-mG-PO-mC-PO- | | fU-PO-mG-PO-mG-PO- | |
| | | lT4-PO-lT4 | | mC-PS-mA-PS-mA | |
| 460 | 314 | lgT3-PO-lgT3-PO-lgT3- | 1374 | mG-PS-fU-PS-mG-PO- | 1572 |
| | | PO-mG-PO-mC-PO-mC-PO- | | mC-PO-mC-PO-fU-PO- | |
| | | mA-PO-fG-PO-mA-PO-fG- | | mC-PO-mG-PO-mA-PO- | |
| | | PO-fU-PO-fU-PO-mA-PO- | | mU-PO-mA-PO-mA-PO- | |
| | | mU-PO-mC-PO-mG-PO-mA- | | mC-PO-fU-PO-mC-PO- | |
| | | PO-mG-PO-mG-PO-mC-PO- | | fU-PO-mG-PO-mG-PO- | |
| | | lT4-PO-lT4 | | mC-PS-mA-PS-mA | |
| 461 | 314 | lgT3-PO-lgT3-PO-lgT3- | 1375 | mG-PS-fU-PS-mG-PO- | 1573 |
| | | PO-mG-PO-mC-PO-mC-PO- | | fC-PO-mC-PO-mU-PO- | |
| | | mA-PO-fG-PO-mA-PO-fG- | | mC-PO-fG-PO-fA-PO- | |
| | | PO-fU-PO-fU-PO-mA-PO- | | mU-PO-mA-PO-mA-PO- | |
| | | mU-PO-mC-PO-mG-PO-mA- | | mC-PO-fU-PO-mC-PO- | |
| | | PO-mG-PO-mG-PO-mC-PO- | | fU-PO-mG-PO-mG-PO- | |
| | | lT4-PO-lT4 | | mC-PS-mA-PS-mA | |
| 462 | 314 | lgT3-PO-lgT3-PO-lgT3- | 1376 | mG-PS-fU-PS-mG-PO- | 1574 |
| | | PO-mG-PO-mC-PO-mC-PO- | | fC-PO-mC-PO-mU-PO- | |
| | | mA-PO-fG-PO-mA-PO-fG- | | mC-PO-mG-PO-fA-PO- | |
| | | PO-fU-PO-fU-PO-mA-PO- | | mU-PO-mA-PO-mA-PO- | |
| | | mU-PO-mC-PO-mG-PO-mA- | | mC-PO-fU-PO-mC-PO- | |
| | | PO-mG-PO-mG-PO-mC-PO- | | fU-PO-mG-PO-mG-PO- | |
| | | lT4-PO-lT4 | | mC-PS-mA-PS-mA | |
| 463 | 314 | lgT3-PO-lgT3-PO-lgT3- | 1377 | fG-PS-fU-PS-mG-PO- | 1575 |
| | | PO-mG-PO-mC-PO-mC-PO- | | fC-PO-mC-PO-fU-PO- | |
| | | mA-PO-fG-PO-mA-PO-fG- | | mC-PO-fG-PO-mA-PO- | |
| | | PO-fU-PO-fU-PO-mA-PO- | | fU-PO-mA-PO-mA-PO- | |
| | | mU-PO-mC-PO-mG-PO-mA- | | mC-PO-fU-PO-mC-PO- | |
| | | PO-mG-PO-mG-PO-mC-PO- | | fU-PO-mG-PO-fG-PO- | |
| | | lT4-PO-lT4 | | mC-PS-dT-PS-dT | |
| 464 | 314 | lgT3-PO-lgT3-PO-lgT3- | 1378 | mG-PS-fU-PS-mG-PO- | 1576 |
| | | PO-mG-PO-mC-PO-mC-PO- | | fC-PO-mC-PO-mU-PO- | |
| | | mA-PO-fG-PO-mA-PO-fG- | | mC-PO-mG-PO-mA-PO- | |
| | | PO-fU-PO-fU-PO-mA-PO- | | mU-PO-mA-PO-mA-PO- | |
| | | mU-PO-mC-PO-mG-PO-mA- | | mC-PO-fU-PO-mC-PO- | |
| | | PO-mG-PO-mG-PO-mC-PO- | | fU-PO-mG-PO-mG-PO- | |
| | | lT4-PO-lT4 | | mC-PS-LA-PS-lA | |
| 465 | 314 | lgT3-PO-lgT3-PO-lgT3- | 1379 | mG-PS-fU-PS-mG-PO- | 1577 |
| | | PO-mG-PO-mC-PO-mC-PO- | | mC-PO-mC-PO-fU-PO- | |
| | | mA-PO-fG-PO-mA-PO-fG- | | mC-PO-mG-PO-mA-PO- | |
| | | PO-fU-PO-fU-PO-mA-PO- | | mU-PO-mA-PO-mA-PO- | |
| | | mU-PO-mC-PO-mG-PO-mA- | | mC-PO-fU-PO-mC-PO- | |
| | | PO-mG-PO-mG-PO-mC-PO- | | fU-PO-mG-PO-mG-PO- | |
| | | lT4-PO-lT4 | | mC-PS-LA-PS-lA | |
| 466 | 314 | lgT3-PO-lgT3-PO-lgT3- | 1380 | mG-PS-fU-PS-mG-PO- | 1578 |
| | | PO-mG-PO-mC-PO-mC-PO- | | fC-PO-mC-PO-mU-PO- | |
| | | mA-PO-fG-PO-mA-PO-fG- | | mC-PO-fG-PO-fA-PO- | |
| | | PO-fU-PO-fU-PO-mA-PO- | | mU-PO-mA-PO-mA-PO- | |
| | | mU-PO-mC-PO-mG-PO-mA- | | mC-PO-fU-PO-mC-PO- | |
| | | PO-mG-PO-mG-PO-mC-PO- | | fU-PO-mG-PO-mG-PO- | |
| | | lT4-PO-lT4 | | mC-PS-LA-PS-lA | |
| 467 | 314 | lgT3-PO-lgT3-PO-lgT3- | 1381 | mG-PS-fU-PS-mG-PO- | 1579 |
| | | PO-mG-PO-mC-PO-mC-PO- | | fC-PO-mC-PO-mU-PO- | |
| | | mA-PO-fG-PO-mA-PO-fG- | | mC-PO-mG-PO-LA-PO- | |
| | | PO-fU-PO-fU-PO-mA-PO- | | mU-PO-mA-PO-mA-PO- | |
| | | mU-PO-mC-PO-mG-PO-mA- | | mC-PO-fU-PO-mC-PO- | |
| | | PO-mG-PO-mG-PO-mC-PO- | | fU-PO-mG-PO-mG-PO- | |
| | | lT4-PO-lT4 | | mC-PS-LA-PS-lA | |
| 468 | 314 | lgT3-PS-lgT3-PS-lgT3- | 1382 | mG-PS-fU-PS-mG-PO- | 1580 |
| | | PO-mG-PO-mC-PO-mC-PO- | | fC-PO-mC-PO-mU-PO- | |
| | | mA-PO-fG-PO-mA-PO-fG- | | mC-PO-mG-PO-mA-PO- | |
| | | PO-fU-PO-fU-PO-mA-PO- | | mU-PO-mA-PO-mA-PO- | |
| | | mU-PO-mC-PO-mG-PO-mA- | | mC-PO-fU-PO-mC-PO- | |
| | | PO-mG-PO-mG-PO-mC-PS- | | fU-PO-mG-PO-mG-PO- | |
| | | lT4-PS-lT4 | | mC-PS-mA-PS-mA | |
| 469 | 314 | lgT3-PS-lgT3-PS-lgT3- | 1383 | mG-PS-fU-PS-mG-PO- | 1581 |
| | | PO-mG-PO-mC-PO-mC-PO- | | mC-PO-mC-PO-fU-PO- | |
| | | mA-PO-fG-PO-mA-PO-fG- | | mC-PO-mG-PO-mA-PO- | |
| | | PO-fU-PO-fU-PO-mA-PO- | | mU-PO-mA-PO-mA-PO- | |
| | | mU-PO-mC-PO-mG-PO-mA- | | mC-PO-fU-PO-mC-PO- | |
| | | PO-mG-PO-mG-PO-mC-PS- | | fU-PO-mG-PO-mG-PO- | |
| | | lT4-PS-lT4 | | mC-PS-mA-PS-mA | |
| 470 | 314 | lgT3-PS-lgT3-PS-lgT3- | 1384 | mG-PS-fU-PS-mG-PO- | 1582 |
| | | PO-mG-PO-mC-PO-mC-PO- | | fC-PO-mC-PO-mU-PO- | |
| | | mA-PO-fG-PO-mA-PO-fG- | | mC-PO-fG-PO-A-PO- | |
| | | PO-fU-PO-fU-PO-mA-PO- | | mU-PO-mA-PO-mA-PO- | |
| | | mU-PO-mC-PO-mG-PO-mA- | | mC-PO-fU-PO-mC-PO- | |
| | | PO-mG-PO-mG-PO-mC-PS- | | fU-PO-mG-PO-mG-PO- | |
| | | lT4-PS-lT4 | | mC-PS-mA-PS-mA | |
| 471 | 314 | lgT3-PS-lgT3-PS-lgT3- | 1385 | mG-PS-fU-PS-mG-PO- | 1583 |
| | | PO-mG-PO-mC-PO-mC-PO- | | fC-PO-mC-PO-mU-PO- | |
| | | mA-PO-fG-PO-mA-PO-fG- | | mC-PO-mG-PO-fA-PO- | |
| | | PO-fU-PO-fU-PO-mA-PO- | | mU-PO-mA-PO-mA-PO- | |
| | | mU-PO-mC-PO-mG-PO-mA- | | mC-PO-fU-PO-mC-PO- | |
| | | PO-mG-PO-mG-PO-mC-PS- | | fU-PO-mG-PO-mG-PO- | |
| | | lT4-PS-lT4 | | mC-PS-mA-PS-mA | |
| 472 | 314 | lgT3-PS-lgT3-PS-lgT3- | 1386 | £G-PS-fU-PS-mG-PO- | 1584 |
| | | PO-mG-PO-mC-PO-mC-PO- | | fC-PO-mC-PO-fU-PO- | |
| | | mA-PO-fG-PO-mA-PO-fG- | | mC-PO-fG-PO-mA-PO- | |
| | | PO-fU-PO-fU-PO-mA-PO- | | fU-PO-mA-PO-mA-PO- | |
| | | mU-PO-mC-PO-mG-PO-mA- | | mC-PO-fU-PO-mC-PO- | |
| | | PO-mG-PO-mG-PO-mC-PS- | | fU-PO-mG-PO-fG-PO- | |
| | | lT4-PS-lT4 | | mC-PS-dT-PS-dT | |
| 473 | 314 | lgT3-PS-lgT3-PS-lgT3- | 1387 | mG-PS-fU-PS-mG-PO- | 1585 |
| | | PO-mG-PO-mC-PO-mC-PO- | | fC-PO-mC-PO-mU-PO- | |
| | | mA-PO-fG-PO-mA-PO-fG- | | mC-PO-mG-PO-mA-PO- | |
| | | PO-fU-PO-fU-PO-mA-PO- | | mU-PO-mA-PO-mA-PO- | |
| | | mU-PO-mC-PO-mG-PO-mA- | | mC-PO-fU-PO-mC-PO- | |
| | | PO-mG-PO-mG-PO-mC-PS- | | fU-PO-mG-PO-mG-PO- | |
| | | lT4-PS-lT4 | | mC-PS-LA-PS-lA | |
| 474 | 314 | lgT3-PS-lgT3-PS-lgT3- | 1388 | mG-PS-fU-PS-mG-PO- | 1586 |
| | | PO-mG-PO-mC-PO-mC-PO- | | mC-PO-mC-PO-fU-PO- | |
| | | mA-PO-fG-PO-mA-PO-fG- | | mC-PO-mG-PO-mA-PO- | |
| | | PO-fU-PO-fU-PO-mA-PO- | | mU-PO-mA-PO-mA-PO- | |
| | | mU-PO-mC-PO-mG-PO-mA- | | mC-PO-fU-PO-mC-PO- | |
| | | PO-mG-PO-mG-PO-mC-PS- | | fU-PO-mG-PO-mG-PO- | |
| | | lT4-PS-lT4 | | mC-PS-LA-PS-LA | |
| 475 | 314 | lgT3-PS-lgT3-PS-lgT3- | 1389 | mG-PS-fU-PS-mG-PO- | 1587 |
| | | PO-mG-PO-mC-PO-mC-PO- | | fC-PO-mC-PO-mU-PO- | |
| | | mA-PO-fG-PO-mA-PO-fG- | | mC-PO-fG-PO-fA-PO- | |
| | | PO-fU-PO-fU-PO-mA-PO- | | mU-PO-mA-PO-mA-PO- | |
| | | mU-PO-mC-PO-mG-PO-mA- | | mC-PO-fU-PO-mC-PO- | |
| | | PO-mG-PO-mG-PO-mC-PS- | | fU-PO-mG-PO-mG-PO- | |
| | | lT4-PS-lT4 | | mC-PS-LA-PS-lA | |
| 476 | 314 | lgT3-PS-lgT3-PS-lgT3- | 1390 | mG-PS-fU-PS-mG-PO- | 1588 |
| | | PO-mG-PO-mC-PO-mC-PO- | | fC-PO-mC-PO-mU-PO- | |
| | | mA-PO-fG-PO-mA-PO-fG- | | mC-PO-mG-PO-LA-PO- | |
| | | PO-fU-PO-fU-PO-mA-PO- | | mU-PO-mA-PO-mA-PO- | |
| | | mU-PO-mC-PO-mG-PO-mA- | | mC-PO-fU-PO-mC-PO- | |
| | | PO-mG-PO-mG-PO-mC-PS- | | fU-PO-mG-PO-mG-PO- | |
| | | lT4-PS-lT4 | | mC-PS-LA-PS-lA | |
| 477 | 314 | lgT3-PO-lgT3-PO-lgT3- | 1391 | mG-PS-fU-PS-mG-PO- | 1589 |
| | | PO-1G-PO-1C-PO-mC-PO- | | fC-PO-mC-PO-mU-PO- | |
| | | mA-PO-fG-PO-mA-PO-fG- | | mC-PO-mG-PO-mA-PO- | |
| | | PO-fU-PO-fU-PO-mA-PO- | | mU-PO-mA-PO-mA-PO- | |
| | | mU-PO-mC-PO-mG-PO-mA- | | mC-PO-fU-PO-mC-PO- | |
| | | PO-mG-PO-mG-PO-mC-PO- | | fU-PO-mG-PO-mG-PO- | |
| | | lT4-PO-lT4 | | mC-PS-mA-PS-mA | |
| 478 | 314 | lgT3-PO-lgT3-PO-lgT3- | 1392 | mG-PS-fU-PS-mG-PO- | 1590 |
| | | PO-1G-PO-1C-PO-mC-PO- | | mC-PO-mC-PO-fU-PO- | |
| | | mA-PO-fG-PO-mA-PO-fG- | | mC-PO-mG-PO-mA-PO- | |
| | | PO-fU-PO-fU-PO-mA-PO- | | mU-PO-mA-PO-mA-PO- | |
| | | mU-PO-mC-PO-mG-PO-mA- | | mC-PO-fU-PO-mC-PO- | |
| | | PO-mG-PO-mG-PO-mC-PO- | | fU-PO-mG-PO-mG-PO- | |
| | | lT4-PO-lT4 | | mC-PS-mA-PS-mA | |
| 479 | 314 | lgT3-PO-lgT3-PO-lgT3- | 1393 | mG-PS-fU-PS-mG-PO- | 1591 |
| | | PO-1G-PO-1C-PO-mC-PO- | | fC-PO-mC-PO-mU-PO- | |
| | | mA-PO-fG-PO-mA-PO-fG- | | mC-PO-fG-PO-fA-PO- | |
| | | PO-fU-PO-fU-PO-mA-PO- | | mU-PO-mA-PO-mA-PO- | |
| | | mU-PO-mC-PO-mG-PO-mA- | | mC-PO-fU-PO-mC-PO- | |
| | | PO-mG-PO-mG-PO-mC-PO- | | fU-PO-mG-PO-mG-PO- | |
| | | lT4-PO-lT4 | | mC-PS-mA-PS-mA | |
| 480 | 314 | lgT3-PO-lgT3-PO-lgT3- | 1394 | mG-PS-fU-PS-mG-PO- | 1592 |
| | | PO-1G-PO-1C-PO-mC-PO- | | fC-PO-mC-PO-mU-PO- | |
| | | mA-PO-fG-PO-mA-PO-fG- | | mC-PO-mG-PO-fA-PO- | |
| | | PO-fU-PO-fU-PO-mA-PO- | | mU-PO-mA-PO-mA-PO- | |
| | | mU-PO-mC-PO-mG-PO-mA- | | mC-PO-fU-PO-mC-PO- | |
| | | PO-mG-PO-mG-PO-mC-PO- | | fU-PO-mG-PO-mG-PO- | |
| | | lT4-PO-lT4 | | mC-PS-mA-PS-mA | |
| 48 | 314 | lgT3-PO-lgT3-PO-lgT3- | 1395 | fG-PS-fU-PS-mG-PO- | 1593 |
| | | PO-1G-PO-1C-PO-mC-PO- | | fC-PO-mC-PO-fU-PO- | |
| | | mA-PO-fG-PO-mA-PO-fG- | | mC-PO-fG-PO-mA-PO- | |
| | | PO-fU-PO-fU-PO-mA-PO- | | fU-PO-mA-PO-mA-PO- | |
| | | mU-PO-mC-PO-mG-PO-mA- | | mC-PO-fU-PO-mC-PO- | |
| | | PO-mG-PO-mG-PO-mC-PO- | | fU-PO-mG-PO-fG-PO- | |
| | | lT4-PO-lT4 | | mC-PS-dT-PS-dT | |
| 482 | 314 | lgT3-PS-lgT3-PS-lgT3- | 1396 | mG-PS-fU-PS-mG-PO- | 1594 |
| | | PO-1G-PO-1C-PO-mC-PO- | | fC-PO-mC-PO-mU-PO- | |
| | | mA-PO-fG-PO-mA-PO-fG- | | mC-PO-mG-PO-mA-PO- | |
| | | PO-fU-PO-fU-PO-mA-PO- | | mU-PO-mA-PO-mA-PO- | |
| | | mU-PO-mC-PO-mG-PO-mA- | | mC-PO-fU-PO-mC-PO- | |
| | | PO-mG-PO-mG-PO-mC-PS- | | fU-PO-mG-PO-mG-PO- | |
| | | lT4-PS-lT4 | | mC-PS-mA-PS-mA | |
| 483 | 314 | lgT3-PS-lgT3-PS-lgT3- | 1397 | mG-PS-fU-PS-mG-PO- | 1595 |
| | | PO-1G-PO-1C-PO-mC-PO- | | mC-PO-mC-PO-fU-PO- | |
| | | mA-PO-fG-PO-mA-PO-fG- | | mC-PO-mG-PO-mA-PO- | |
| | | PO-fU-PO-fU-PO-mA-PO- | | mU-PO-mA-PO-mA-PO- | |
| | | mU-PO-mC-PO-mG-PO-mA- | | mC-PO-fU-PO-mC-PO- | |
| | | PO-mG-PO-mG-PO-mC-PS- | | fU-PO-mG-PO-mG-PO- | |
| | | lT4-PS-lT4 | | mC-PS-mA-PS-mA | |
| 484 | 314 | lgT3-PS-lgT3-PS-lgT3- | 1398 | mG-PS-fU-PS-mG-PO- | 1596 |
| | | PO-1G-PO-1C-PO-mC-PO- | | fC-PO-mC-PO-mU-PO- | |
| | | mA-PO-fG-PO-mA-PO-fG- | | mC-PO-fG-PO-fA-PO- | |
| | | PO-fU-PO-fU-PO-mA-PO- | | mU-PO-mA-PO-mA-PO- | |
| | | mU-PO-mC-PO-mG-PO-mA- | | mC-PO-fU-PO-mC-PO- | |
| | | PO-mG-PO-mG-PO-mC-PS- | | fU-PO-mG-PO-mG-PO- | |
| | | lT4-PS-lT4 | | mC-PS-mA-PS-mA | |
| 485 | 314 | lgT3-PS-lgT3-PS-lgT3- | 1399 | mG-PS-fU-PS-mG-PO- | \|1597 |
| | | PO-1G-PO-1C-PO-mC-PO- | | fC-PO-mC-PO-mU-PO- | |
| | | mA-PO-fG-PO-mA-PO-fG- | | mC-PO-mG-PO-fA-PO- | |
| | | PO-fU-PO-fU-PO-mA-PO- | | mU-PO-mA-PO-mA-PO- | |
| | | mU-PO-mC-PO-mG-PO-mA- | | mC-PO-fU-PO-mC-PO- | |
| | | PO-mG-PO-mG-PO-mC-PS- | | fU-PO-mG-PO-mG-PO- | |
| | | lT4-PS-lT4 | | mC-PS-mA-PS-mA | |
| 486 | 314 | lgT3-PS-lgT3-PS-lgT3- | 1400 | fG-PS-fU-PS-mG-PO- | 1598 |
| | | PO-1G-PO-1C-PO-mC-PO- | | fC-PO-mC-PO-fU-PO- | |
| | | mA-PO-fG-PO-mA-PO-fG- | | mC-PO-fG-PO-mA-PO- | |
| | | PO-fU-PO-fU-PO-mA-PO- | | fU-PO-mA-PO-mA-PO- | |
| | | mU-PO-mC-PO-mG-PO-mA- | | mC-PO-fU-PO-mC-PO- | |
| | | PO-mG-PO-mG-PO-mC-PS- | | fU-PO-mG-PO-fG-PO- | |
| | | lT4-PS-lT4 | | mC-PS-dT-PS-dT | |
| 487 | 314 | lgT3-PO-lgT3-PO-lgT3- | 1401 | mG-PS-fU-PS-mG-PO- | 1599 |
| | | PO-mG-PO-mC-PO-mC-PO- | | fC-PO-mC-PO-mU-PO- | |
| | | mA-PO-fG-PO-mA-PO-fG- | | mC-PO-mG-PO-mA-PO- | |
| | | PO-fU-PO-fU-PO-mA-PO- | | mU-PO-mA-PO-mA-PO- | |
| | | mU-PO-mC-PO-mG-PO-mA- | | mC-PO-fU-PO-mC-PO- | |
| | | PO-mG-PO-mG-PO-mC-PO- | | fU-PO-mG-PO-mG-PO- | |
| | | mA-PO-mC-PO-lT4-PO-lT4 | | mC-PS-mA-PS-mA | |
| 488 | 314 | lgT3-PO-lgT3-PO-lgT3- | 1402 | mG-PS-fU-PS-mG-PO- | 1600 |
| | | PO-mG-PO-mC-PO-mC-PO- | | mC-PO-mC-PO-fU-PO- | |
| | | mA-PO-fG-PO-mA-PO-fG- | | mC-PO-mG-PO-mA-PO- | |
| | | PO-fU-PO-fU-PO-mA-PO- | | mU-PO-mA-PO-mA-PO- | |
| | | mU-PO-mC-PO-mG-PO-mA- | | mC-PO-fU-PO-mC-PO- | |
| | | PO-mG-PO-mG-PO-mC-PO- | | fU-PO-mG-PO-mG-PO- | |
| | | mA-PO-mC-PO-lT4-PO-lT4 | | mC-PS-mA-PS-mA-Hy | |
| 489 | 314 | lgT3-PO-lgT3-PO-lgT3- | 1403 | mG-PS-fU-PS-mG-PO- | 1601 |
| | | PO-mG-PO-mC-PO-mC-PO- | | fC-PO-mC-PO-mU-PO- | |
| | | mA-PO-fG-PO-mA-PO-fG- | | mC-PO-fG-PO-fA-PO- | |
| | | PO-fU-PO-fU-PO-mA-PO- | | mU-PO-mA-PO-mA-PO- | |
| | | mU-PO-mC-PO-mG-PO-mA- | | mC-PO-fU-PO-mC-PO- | |
| | | PO-mG-PO-mG-PO-mC-PO- | | fU-PO-mG-PO-mG-PO- | |
| | | mA-PO-mC-PO-lT4-PO-lT4 | | mC-PS-mA-PS-mA | |
| 490 | 314 | lgT3-PO-lgT3-PO-lgT3- | 1404 | mG-PS-fU-PS-mG-PO- | \|1602 |
| | | PO-mG-PO-mC-PO-mC-PO- | | fC-PO-mC-PO-mU-PO- | |
| | | mA-PO-fG-PO-mA-PO-fG- | | mC-PO-mG-PO-fA-PO- | |
| | | PO-fU-PO-fU-PO-mA-PO- | | mU-PO-mA-PO-mA-PO- | |
| | | mU-PO-mC-PO-mG-PO-mA- | | mC-PO-fU-PO-mC-PO- | |
| | | PO-mG-PO-mG-PO-mC-PO- | | fU-PO-mG-PO-mG-PO- | |
| | | mA-PO-mC-PO-lT4-PO-lT4 | | mC-PS-mA-PS-mA | |
| 491 | 314 | lgT3-PO-lgT3-PO-lgT3- | 1405 | fG-PS-fU-PS-mG-PO- | 1603 |
| | | PO-mG-PO-mC-PO-mC-PO- | | fC-PO-mC-PO-fU-PO- | |
| | | mA-PO-fG-PO-mA-PO-fG- | | mC-PO-fG-PO-mA-PO- | |
| | | PO-fU-PO-fU-PO-mA-PO- | | fU-PO-mA-PO-mA-PO- | |
| | | mU-PO-mC-PO-mG-PO-mA- | | mC-PO-fU-PO-mC-PO- | |
| | | PO-mG-PO-mG-PO-mC-PO- | | fU-PO-mG-PO-fG-PO- | |
| | | mA-PO-mC-PO-lT4-PO-lT4 | | mC-PS-dT-PS-dT | |
| 492 | 314 | lgT3-PO-lgT3-PO-lgT3- | 1406 | mG-PS-fU-PS-mG-PO- | 1604 |
| | | PO-mG-PO-mC-PO-mC-PO- | | fC-PO-mC-PO-mU-PO- | |
| | | mA-PO-fG-PO-mA-PO-fG- | | mC-PO-mG-PO-mA-PO- | |
| | | PO-fU-PO-fU-PO-mA-PO- | | mU-PO-mA-PO-mA-PO- | |
| | | mU-PO-mC-PO-mG-PO-mA- | | mC-PO-fU-PO-mC-PO- | |
| | | PO-mG-PO-mG-PO-mC-PO- | | fU-PO-mG-PO-mG-PO- | |
| | | mA-PO-mC-PO-lT4-PO-lT4 | | mC-PS-LA-PS-lA | |
| 493 | 314 | lgT3-PO-lgT3-PO-lgT3- | 1407 | mG-PS-fU-PS-mG-PO- | 1605 |
| | | PO-mG-PO-mC-PO-mC-PO- | | mC-PO-mC-PO-fU-PO- | |
| | | mA-PO-fG-PO-mA-PO-fG- | | mC-PO-mG-PO-mA-PO- | |
| | | PO-fU-PO-fU-PO-mA-PO- | | mU-PO-mA-PO-mA-PO- | |
| | | mU-PO-mC-PO-mG-PO-mA- | | mC-PO-fU-PO-mC-PO- | |
| | | PO-mG-PO-mG-PO-mC-PO- | | fU-PO-mG-PO-mG-PO- | |
| | | mA-PO-mC-PO-lT4-PO-lT4 | | mC-PS-LA-PS-lA | |
| 494 | 314 | lgT3-PO-lgT3-PO-lgT3- | 1408 | mG-PS-fU-PS-mG-PO- | 1606 |
| | | PO-mG-PO-mC-PO-mC-PO- | | fC-PO-mC-PO-mU-PO- | |
| | | mA-PO-fG-PO-mA-PO-fG- | | mC-PO-fG-PO-fA-PO- | |
| | | PO-fU-PO-fU-PO-mA-PO- | | mU-PO-mA-PO-mA-PO- | |
| | | mU-PO-mC-PO-mG-PO-mA- | | mC-PO-fU-PO-mC-PO- | |
| | | PO-mG-PO-mG-PO-mC-PO- | | fU-PO-mG-PO-mG-PO- | |
| | | mA-PO-mC-PO-lT4-PO-lT4 | | mC-PS-lA-PS-lA | |
| 495 | 314 | lgT3-PO-lgT3-PO-lgT3- | 1409 | mG-PS-fU-PS-mG-PO- | 1607 |
| | | PO-mG-PO-mC-PO-mC-PO- | | fC-PO-mC-PO-mU-PO- | |
| | | mA-PO-fG-PO-mA-PO-fG- | | mC-PO-mG-PO-fA-PO- | |
| | | PO-fU-PO-fU-PO-mA-PO- | | mU-PO-mA-PO-mA-PO- | |
| | | mU-PO-mC-PO-mG-PO-mA- | | mC-PO-fU-PO-mC-PO- | |
| | | PO-mG-PO-mG-PO-mC-PO- | | fU-PO-mG-PO-mG-PO- | |
| | | mA-PO-mC-PO-lT4-PO-lT4 | | mC-PS-LA-PS-lA | |
| 496 | 314 | lgT3-PS-lgT3-PS-lgT3- | 1410 | mG-PS-fU-PS-mG-PO- | 1608 |
| | | PO-mG-PO-mC-PO-mC-PO- | | fC-PO-mC-PO-mU-PO- | |
| | | mA-PO-fG-PO-mA-PO-fG- | | mC-PO-mG-PO-mA-PO- | |
| | | PO-fU-PO-fU-PO-mA-PO- | | mU-PO-mA-PO-mA-PO- | |
| | | mU-PO-mC-PO-mG-PO-mA- | | mC-PO-fU-PO-mC-PO- | |
| | | PO-mG-PO-mG-PO-mC-PO- | | fU-PO-mG-PO-mG-PO- | |
| | | mA-PO-mC-PS-lT4-PS-lT4 | | mC-PS-mA-PS-mA | |
| 497 | 314 | lgT3-PS-lgT3-PS-lgT3- | 1411 | mG-PS-fU-PS-mG-PO- | 1609 |
| | | PO-mG-PO-mC-PO-mC-PO- | | mC-PO-mC-PO-fU-PO- | |
| | | mA-PO-fG-PO-mA-PO-fG- | | mC-PO-mG-PO-mA-PO- | |
| | | PO-fU-PO-fU-PO-mA-PO- | | mU-PO-mA-PO-mA-PO- | |
| | | mU-PO-mC-PO-mG-PO-mA- | | mC-PO-fU-PO-mC-PO- | |
| | | PO-mG-PO-mG-PO-mC-PO- | | fU-PO-mG-PO-mG-PO- | |
| | | mA-PO-mC-PS-lT4-PS-lT4 | | mC-PS-mA-PS-mA | |
| 498 | 314 | lgT3-PS-lgT3-PS-lgT3- | 1412 | mG-PS-fU-PS-mG-PO- | 1610 |
| | | PO-mG-PO-mC-PO-mC-PO- | | fC-PO-mC-PO-mU-PO- | |
| | | mA-PO-fG-PO-mA-PO-fG- | | mC-PO-fG-PO-fA-PO- | |
| | | PO-fU-PO-fU-PO-mA-PO- | | mU-PO-mA-PO-mA-PO- | |
| | | mU-PO-mC-PO-mG-PO-mA- | | mC-PO-fU-PO-mC-PO- | |
| | | PO-mG-PO-mG-PO-mC-PO- | | fU-PO-mG-PO-mG-PO- | |
| | | mA-PO-mC-PS-lT4-PS-lT4 | | mC-PS-mA-PS-mA | |
| 499 | 314 | lgT3-PS-lgT3-PS-lgT3- | 1413 | mG-PS-fU-PS-mG-PO- | \|1611 |
| | | PO-mG-PO-mC-PO-mC-PO- | | fC-PO-mC-PO-mU-PO- | |
| | | mA-PO-fG-PO-mA-PO-fG- | | mC-PO-mG-PO-fA-PO- | |
| | | PO-fU-PO-fU-PO-mA-PO- | | mU-PO-mA-PO-mA-PO- | |
| | | mU-PO-mC-PO-mG-PO-mA- | | mC-PO-fU-PO-mC-PO- | |
| | | PO-mG-PO-mG-PO-mC-PO- | | fU-PO-mG-PO-mG-PO- | |
| | | mA-PO-mC-PS-lT4-PS-lT4 | | mC-PS-mA-PS-mA | |
| 500 | 314 | lgT3-PS-lgT3-PS-lgT3- | 1414 | fG-PS-fU-PS-mG-PO- | 1612 |
| | | PO-mG-PO-mC-PO-mC-PO- | | fC-PO-mC-PO-fU-PO- | |
| | | mA-PO-fG-PO-mA-PO-fG- | | mC-PO-fG-PO-mA-PO- | |
| | | PO-fU-PO-fU-PO-mA-PO- | | fU-PO-mA-PO-mA-PO- | |
| | | mU-PO-mC-PO-mG-PO-mA- | | mC-PO-fU-PO-mC-PO- | |
| | | PO-mG-PO-mG-PO-mC-PO- | | fU-PO-mG-PO-fG-PO- | |
| | | mA-PO-mC-PS-lT4-PS-lT4 | | mC-PS-dT-PS-dT | |
| 501 | 314 | lgT3-PS-lgT3-PS-lgT3- | 1415 | mG-PS-fU-PS-mG-PO- | 1613 |
| | | PO-mG-PO-mC-PO-mC-PO- | | fC-PO-mC-PO-mU-PO- | |
| | | mA-PO-fG-PO-mA-PO-fG- | | mC-PO-mG-PO-mA-PO- | |
| | | PO-fU-PO-fU-PO-mA-PO- | | mU-PO-mA-PO-mA-PO- | |
| | | mU-PO-mC-PO-mG-PO-mA- | | mC-PO-fU-PO-mC-PO- | |
| | | PO-mG-PO-mG-PO-mC-PO- | | fU-PO-mG-PO-mG-PO- | |
| | | mA-PO-mC-PS-lT4-PS-lT4 | | mC-PS-lA-PS-lA | |
| 502 | 314 | lgT3-PS-lgT3-PS-lgT3- | 1416 | mG-PS-fU-PS-mG-PO- | 1614 |
| | | PO-mG-PO-mC-PO-mC-PO- | | mC-PO-mC-PO-fU-PO- | |
| | | mA-PO-fG-PO-mA-PO-fG- | | mC-PO-mG-PO-mA-PO- | |
| | | PO-fU-PO-fU-PO-mA-PO- | | mU-PO-mA-PO-mA-PO- | |
| | | mU-PO-mC-PO-mG-PO-mA- | | mC-PO-fU-PO-mC-PO- | |
| | | PO-mG-PO-mG-PO-mC-PO- | | fU-PO-mG-PO-mG-PO- | |
| | | mA-PO-mC-PS-lT4-PS-lT4 | | mC-PS-LA-PS-lA | |
| 503 | 314 | lgT3-PS-lgT3-PS-lgT3- | 1417 | mG-PS-fU-PS-mG-PO- | 1615 |
| | | PO-mG-PO-mC-PO-mC-PO- | | fC-PO-mC-PO-mU-PO- | |
| | | mA-PO-fG-PO-mA-PO-fG- | | mC-PO-fG-PO-fA-PO- | |
| | | PO-fU-PO-fU-PO-mA-PO- | | mU-PO-mA-PO-mA-PO- | |
| | | mU-PO-mC-PO-mG-PO-mA- | | mC-PO-fU-PO-mC-PO- | |
| | | PO-mG-PO-mG-PO-mC-PO- | | fU-PO-mG-PO-mG-PO- | |
| | | mA-PO-mC-PS-lT4-PS-lT4 | | mC-PS-LA-PS-lA | |
| 504 | 314 | lgT3-PS-lgT3-PS-lgT3- | 1418 | mG-PS-fU-PS-mG-PO- | 1616 |
| | | PO-mG-PO-mC-PO-mC-PO- | | fC-PO-mC-PO-mU-PO- | |
| | | mA-PO-fG-PO-mA-PO-fG- | | mC-PO-mG-PO-fA-PO- | |
| | | PO-fU-PO-fU-PO-mA-PO- | | mU-PO-mA-PO-mA-PO- | |
| | | mU-PO-mC-PO-mG-PO-mA- | | mC-PO-fU-PO-mC-PO- | |
| | | PO-mG-PO-mG-PO-mC-PO- | | fU-PO-mG-PO-mG-PO- | |
| | | mA-PO-mC-PS-lT4-PS-lT4 | | mC-PS-LA-PS-lA | |
| 505 | 314 | lgT3-PO-lgT3-PO-lgT3- | 1419 | mG-PS-fU-PS-mG-PO- | 1617 |
| | | PO-1G-PO-1C-PO-mC-PO- | | fC-PO-mC-PO-mU-PO- | |
| | | mA-PO-fG-PO-mA-PO-fG- | | mC-PO-mG-PO-mA-PO- | |
| | | PO-fU-PO-fU-PO-mA-PO- | | mU-PO-mA-PO-mA-PO- | |
| | | mU-PO-mC-PO-mG-PO-mA- | | mC-PO-fU-PO-mC-PO- | |
| | | PO-mG-PO-mG-PO-mC-PO- | | fU-PO-mG-PO-mG-PO- | |
| | | mA-PO-mC-PO-lT4-PO-lT4 | | mC-PS-mA-PS-mA | |
| 506 | 314 | lgT3-PO-lgT3-PO-lgT3- | 1420 | mG-PS-fU-PS-mG-PO- | 1618 |
| | | PO-1G-PO-1C-PO-mC-PO- | | mC-PO-mC-PO-fU-PO- | |
| | | mA-PO-fG-PO-mA-PO-fG- | | mC-PO-mG-PO-mA-PO- | |
| | | PO-fU-PO-fU-PO-mA-PO- | | mU-PO-mA-PO-mA-PO- | |
| | | mU-PO-mC-PO-mG-PO-mA- | | mC-PO-fU-PO-mC-PO- | |
| | | PO-mG-PO-mG-PO-mC-PO- | | fU-PO-mG-PO-mG-PO- | |
| | | mA-PO-mC-PO-lT4-PO-lT4 | | mC-PS-mA-PS-mA | |
| 507 | 314 | lgT3-PO-lgT3-PO-lgT3- | 1421 | mG-PS-fU-PS-mG-PO- | 1619 |
| | | PO-1G-PO-1C-PO-mC-PO- | | fC-PO-mC-PO-mU-PO- | |
| | | mA-PO-fG-PO-mA-PO-fG- | | mC-PO-fG-PO-fA-PO- | |
| | | PO-fU-PO-fU-PO-mA-PO- | | mU-PO-mA-PO-mA-PO- | |
| | | mU-PO-mC-PO-mG-PO-mA- | | mC-PO-fU-PO-mC-PO- | |
| | | PO-mG-PO-mG-PO-mC-PO- | | fU-PO-mG-PO-mG-PO- | |
| | | mA-PO-mC-PO-lT4-PO-lT4 | | mC-PS-mA-PS-mA | |
| 508 | 314 | lgT3-PO-lgT3-PO-lgT3- | 1422 | mG-PS-fU-PS-mG-PO- | 1620 |
| | | PO-1G-PO-1C-PO-mC-PO- | | fC-PO-mC-PO-mU-PO- | |
| | | mA-PO-fG-PO-mA-PO-fG- | | mC-PO-mG-PO-LA-PO- | |
| | | PO-fU-PO-fU-PO-mA-PO- | | mU-PO-mA-PO-mA-PO- | |
| | | mU-PO-mC-PO-mG-PO-mA- | | mC-PO-fU-PO-mC-PO- | |
| | | PO-mG-PO-mG-PO-mC-PO- | | fU-PO-mG-PO-mG-PO- | |
| | | mA-PO-mC-PO-lT4-PO-lT4 | | mC-PS-mA-PS-mA | |
| 509 | 314 | lgT3-PO-lgT3-PO-lgT3- | 1423 | fG-PS-fU-PS-mG-PO- | 1621 |
| | | PO-1G-PO-1C-PO-mC-PO- | | fC-PO-mC-PO-fU-PO- | |
| | | mA-PO-fG-PO-mA-PO-fG- | | mC-PO-fG-PO-mA-PO- | |
| | | PO-fU-PO-fU-PO-mA-PO- | | fU-PO-mA-PO-mA-PO- | |
| | | mU-PO-mC-PO-mG-PO-mA- | | mC-PO-fU-PO-mC-PO- | |
| | | PO-mG-PO-mG-PO-mC-PO- | | fU-PO-mG-PO-fG-PO- | |
| | | mA-PO-mC-PO-lT4-PO-lT4 | | mC-PS-dT-PS-dT | |
| 510 | 314 | lgT3-PS-lgT3-PS-lgT3- | 1424 | mG-PS-fU-PS-mG-PO- | 1622 |
| | | PO-1G-PO-1C-PO-mC-PO- | | fC-PO-mC-PO-mU-PO- | |
| | | mA-PO-fG-PO-mA-PO-fG- | | mC-PO-mG-PO-mA-PO- | |
| | | PO-fU-PO-fU-PO-mA-PO- | | mU-PO-mA-PO-mA-PO- | |
| | | mU-PO-mC-PO-mG-PO-mA- | | mC-PO-fU-PO-mC-PO- | |
| | | PO-mG-PO-mG-PO-mC-PO- | | fU-PO-mG-PO-mG-PO- | |
| | | mA-PO-mC-PS-lT4-PS-lT4 | | mC-PS-mA-PS-mA | |
| 511 | 314 | lgT3-PS-lgT3-PS-lgT3- | 1425 | mG-PS-fU-PS-mG-PO- | 1623 |
| | | PO-1G-PO-1C-PO-mC-PO- | | mC-PO-mC-PO-fU-PO- | |
| | | mA-PO-fG-PO-mA-PO-fG- | | mC-PO-mG-PO-mA-PO- | |
| | | PO-fU-PO-fU-PO-mA-PO- | | mU-PO-mA-PO-mA-PO- | |
| | | mU-PO-mC-PO-mG-PO-mA- | | mC-PO-fU-PO-mC-PO- | |
| | | PO-mG-PO-mG-PO-mC-PO- | | fU-PO-mG-PO-mG-PO- | |
| | | mA-PO-mC-PS-lT4-PS-lT4 | | mC-PS-mA-PS-mA | |
| 512 | 314 | lgT3-PS-lgT3-PS-lgT3- | 1426 | mG-PS-fU-PS-mG-PO- | 1624 |
| | | PO-1G-PO-1C-PO-mC-PO- | | fC-PO-mC-PO-mU-PO- | |
| | | mA-PO-fG-PO-mA-PO-fG- | | mC-PO-fG-PO-fA-PO- | |
| | | PO-fU-PO-fU-PO-mA-PO- | | mU-PO-mA-PO-mA-PO- | |
| | | mU-PO-mC-PO-mG-PO-mA- | | mC-PO-fU-PO-mC-PO- | |
| | | PO-mG-PO-mG-PO-mC-PO- | | fU-PO-mG-PO-mG-PO- | |
| | | mA-PO-mC-PS-lT4-PS-lT4 | | mC-PS-mA-PS-mA | |
| 513 | 314 | lgT3-PS-lgT3-PS-lgT3- | 1427 | mG-PS-fU-PS-mG-PO- | 1625 |
| | | PO-1G-PO-1C-PO-mC-PO- | | fC-PO-mC-PO-mU-PO- | |
| | | mA-PO-fG-PO-mA-PO-fG- | | mC-PO-mG-PO-fA-PO- | |
| | | PO-fU-PO-fU-PO-mA-PO- | | mU-PO-mA-PO-mA-PO- | |
| | | mU-PO-mC-PO-mG-PO-mA- | | mC-PO-fU-PO-mC-PO- | |
| | | PO-mG-PO-mG-PO-mC-PO- | | fU-PO-mG-PO-mG-PO- | |
| | | mA-PO-mC-PS-lT4-PS-lT4 | | mC-PS-mA-PS-mA-Hy | |
| 514 | 314 | lgT3-PS-lgT3-PS-lgT3- | 1428 | fG-PS-fU-PS-mG-PO- | 1626 |
| | | PO-1G-PO-1C-PO-mC-PO- | | fC-PO-mC-PO-fU-PO- | |
| | | mA-PO-fG-PO-mA-PO-fG- | | mC-PO-fG-PO-mA-PO- | |
| | | PO-fU-PO-fU-PO-mA-PO- | | fU-PO-mA-PO-mA-PO- | |
| | | mU-PO-mC-PO-mG-PO-mA- | | mC-PO-fU-PO-mC-PO- | |
| | | PO-mG-PO-mG-PO-mC-PO- | | fU-PO-mG-PO-fG-PO- | |
| | | mA-PO-mC-PS-lT4-PS-lT4 | | mC-PS-dT-PS-dT | |

[0194] While the exemplary siRNAs shown in Tables 2, 3, and 4 include nucleotide modifications, siRNAs having the same or substantially the same sequences but different numbers, patterns, and/or types of modifications, are also contemplated.

[0195] In some embodiments, a dsRNA comprises a sense strand shown in Table 1 with the addition of nucleotides (or modified versions thereof) at either or both of its termini. For example, the dsRNA comprises a sense strand shown in Table 1 with the addition of a 5′ CCA and/or a 3′ invdT. In some embodiments, a dsRNA comprises an antisense strand shown in Table 1 with the addition of nucleotides (or modified versions thereof) at either or both of its termini. For example, the dsRNA comprises an antisense strand shown in Table 1 with the addition of a 3′ dTdT. In certain embodiments, a dsRNA comprises a pair of sense and antisense strands as shown in Table 1, with the addition of a 5′ CCA and a 3′ invdT to the sense strand and with the addition of a 3′ dTdT to the antisense strand. In certain embodiments, a dsRNA comprises a pair of sense and antisense strands as shown in Table 2, with the addition of a 5′ lgT3-1gT3-1gT3 and a 3′ 1T4-lT4 to the sense strand.

[0196] In some embodiments, a dsRNA of the present disclosure comprises a sense sequence that is at least 70%, 75%, 80%, 85%, 90%, 95%, 96%, 97%, 98%, or 99% identical in sequence to a sense sequence shown in Table 1. In some embodiments, a dsRNA of the present disclosure comprises an antisense sequence that is at least 70%, 75%, 80%, 85%, 90%, 95%, 96%, 97%, 98%, or 99% identical in sequence to an antisense sequence shown in Table 1. In some embodiments, a dsRNA of the present disclosure comprises sense and antisense sequences that are at least 70%, 75%, 80%, 85%, 90%, 95%, 96%, 97%, 98%, or 99% identical in sequence to sense and antisense sequences, respectively, shown in Table 1. In certain embodiments, the dsRNA comprises sense and antisense strands having the sequences shown in Table 2. In certain embodiments, the dsRNA comprises sense and antisense strands having the sequences shown in Tables 3 and 4. In certain embodiments, the dsRNA is selected from the dsRNA in Tables 1-4.

[0197] The “percentage identity” between two nucleotide sequences is determined by comparing the two optimally-aligned sequences in which the nucleic acid sequence to compare can have additions or deletions compared to the reference sequence for optimal alignment between the two sequences. “Percentage identity” is calculated by determining the number of positions at which the nucleotide residue is identical between the two sequences, preferably between the two complete sequences, dividing the number of identical positions by the total number of positions in the alignment window and multiplying the result by 100 to obtain the percentage identity between the two sequences. For purposes herein, when determining “percentage identity” between two nucleotide sequences, modifications to the nucleotides are not considered. For example, a sequence of 5′-mC-fU-mA-fG-3′ is considered having 100% sequence identity as a sequence of 5′-CUAG-3′.

[0198] I.5 dsRNA Conjugates

[0199] The present dsRNAs may be covalently or noncovalently linked to one or more ligands or moieties. Examples of such ligands and moieties may be found, e.g., in Jeong et al., Bioconjugate Chem. (2009) 20:5-14 and Sebestyen et al., Methods Mol Biol. (2015) 1218:163-86. In some embodiments, the dsRNA is conjugated/attached to one or more ligands via a linker. Any linker known in the art may be used, including, for example, multivalent (e.g., bivalent, trivalent, or tetravalent) branched linkers. The linker may be cleavable or non-cleavable. Conjugating a ligand to a dsRNA may alter its distribution, enhance its cellular absorption and/or targeting to a particular tissue and/or uptake by one or more specific cell types (e.g., liver cells), and/or enhance the lifetime or half-life of the dsRNA. In some embodiments, a hydrophobic ligand is conjugated to the dsRNA to facilitate direct permeation of the cellular membrane and/or uptake across cells (e.g., liver cells). For LPA mRNA-targeting dsRNAs (e.g., siRNAs), the target tissue may be the liver, including parenchymal cells of the liver (e.g., hepatocytes). In some embodiments, the dsRNA is conjugated to one or more ligands with or without a linker.

[0200] In some embodiments, the dsRNA of the present disclosure is conjugated to a cell-targeting ligand. A cell-targeting ligand refers to a molecular moiety that facilitates delivery of the dsRNA to the target cell, which encompasses (i) increased specificity of the dsRNA to bind to cells expressing the selected target receptors (e.g., target proteins); (ii) increased uptake of the dsRNA by the target cells; and (iii) increased ability of the dsRNA to be appropriately processed once it has entered into a target cell, such as increased intracellular release of an siRNA, e.g., by facilitating the translocation of the siRNA from transport vesicles into the cytoplasm. The ligand may be, for example, a protein (e.g., a glycoprotein), a peptide, a lipid, a carbohydrate, an aptamer, or a molecule having a specific affinity for a co-ligand.

[0201] Specific examples of ligands include, without limitation, an antibody or antigen-binding fragment thereof that binds to a specific receptor on a liver cell, thyrotropin, melanotropin, surfactant protein A, mucin carbohydrate, multivalent lactose, multivalent galactose, multivalent mannose, multivalent fucose, N-acetylgalactosamine, N-acetylglucosamine, transferrin, bisphosphonate, a steroid, bile acid, lipopolysaccharide, a recombinant or synthetic molecule such as a synthetic polymer, polyamino acids, an alpha helical peptide, polyglutamate, polyaspartate, lectins, and cofactors. In some embodiments, the ligand is one or more dyes, crosslinkers, polycyclic aromatic hydrocarbons, peptide conjugates (e.g., antennapedia peptide, Tat peptide), polyethylene glycol (PEG), enzymes, haptens, transport/absorption facilitators, synthetic ribonucleases (e.g., imidazole, bisimidazole, histamine, or imidazole clusters), human serum albumin (HSA), or LDL.

[0202] In some embodiments, the dsRNA is conjugated to one or more cholesterol derivatives or lipophilic moieties such as cholesterol or a cholesterol derivative; cholic acid; a vitamin (such as folate, vitamin A, vitamin E (tocopherol), biotin, or pyridoxal); bile or fatty acid conjugates, including both saturated and non-saturated (such as lauroyl (C12), myristoyl (C14), palmitoyl (C16), stearoyl (C18) and docosanyl (C22), lithocholic acid and/or lithocholic acid oleylamine conjugate (lithocholic-oleyl, C43)); polymeric backbones or scaffolds (such as PEG, triethylene glycol (TEG), hexaethylene glycol (HEG), poly(lactic-co-glycolic acid) (PLGA), poly(lactide-co-glycolide) (PLG), hydrodynamic polymers); steroids (such as dihydrotestosterone); terpene (such as triterpene); cationic lipids or peptides; and/or a lipid or lipid-based molecule. Such a lipid or lipid-based molecule may bind a serum protein, e.g., human serum albumin (HSA). A lipid-based ligand may be used to modulate (e.g., control) the binding of the conjugate to a target tissue. For example, a lipid or lipid-based ligand that binds to HSA more strongly will be less likely to be targeted to the kidney and therefore less likely to be cleared from the body.

[0203] In some embodiments, the cell-targeting moiety or ligand is a N-acetylgalactosamine (GalNAc) derivative. In some embodiments, the dsRNA is attached to one or more (e.g., two, three, four, or more) GalNAc derivatives. The attachment may be via one or more linkers (e.g., two, three, four, or more linkers). In some embodiments, a linker described herein is a multivalent (e.g., bivalent, trivalent, or tetravalent) branched linker. In some embodiments, the dsRNA is attached to two or more GalNAc derivatives via a bivalent branched linker. In some embodiments, the dsRNA is attached to three or more GalNAc derivatives via a trivalent branched linker. In some embodiments, the dsRNA is attached to three or more GalNAc derivatives with or without linkers. In some embodiments, the dsRNA is attached to four or more GalNAc derivatives via four separate linkers. In some embodiments, the dsRNA is attached to four or more GalNAc derivatives via a tetravalent branched linker. In some embodiments, the one or more GalNAc derivatives is attached to the 3′-end of the sense strand, the 3′-end of the antisense strand, the 5′-end of the sense strand, and/or the 5′-end of the antisense strand of the dsRNA. Exemplary and non-limiting conjugates and linkers are described, e.g., in Biessen et al., Bioconjugate Chem. (2002) 13(2):295-302; Cedillo et al., Molecules (2017) 22(8):E1356; Grijalvo et al., Genes (2018) 9(2):E74; Huang et al., Molecular Therapy: Nucleic Acids (2017) 6:116-32; Nair et al., J Am Chem Soc. (2014) 136:16958-61; Ostergaard et al., Bioconjugate Chem. (2015) 26:1451-5; Springer et al., Nucleic Acid Therapeutics (2018) 28(3):109-18; and U.S. Pat. Nos. 8,106,022, 9,127,276, and 8,927,705. GalNAc conjugation can be readily performed by methods well known in the art (e.g., as described in the above documents).

[0204] In some embodiments, the ligand is N-acetylgalactosamine (GalNAc) and the dsRNA is conjugated to one or more GalNAc.

### II. Methods of Making dsRNAs

[0205] A dsRNA of the present disclosure may be synthesized by any method known in the art. For example, a dsRNA may be synthesized by use of an automated synthesizer, by in vitro transcription and purification (e.g., using commercially available in vitro RNA synthesis kits), by transcription and purification from cells (e.g., cells comprising an expression cassette/vector encoding the dsRNA), and the like. In some embodiments, the sense and antisense strands of the dsRNA are synthesized separately and then annealed to form the dsRNA. In some embodiments, the dsRNA comprising modified nucleotides of formula (I) and optionally conjugated to a cell targeting moiety (e.g., GalNAc) may be prepared according to the disclosure of PCT Publication WO 2019/170731.

[0206] Ligand-conjugated dsRNAs and ligand molecules bearing sequence-specific linked nucleosides of the present disclosure may be assembled by any method known in the art, including, for example, assembly on a suitable polynucleotide synthesizer utilizing standard nucleotide or nucleoside precursors, or nucleotide or nucleoside conjugate precursors that already bear the linking moiety, ligand-nucleotide, or nucleoside-conjugated precursors that already bear the ligand molecule, or non-nucleoside ligand-bearing building blocks.

[0207] Ligand-conjugated dsRNAs of the present disclosure may be synthesized by any method known in the art, including, for example, by the use of a dsRNA bearing a pendant reactive functionality such as that derived from the attachment of a linking molecule onto the dsRNA. In some embodiments, this reactive oligonucleotide may be reacted directly with commercially-available ligands, ligands that are synthesized bearing any of a variety of protecting groups, or ligands that have a linking moiety attached thereto. In some embodiments, the methods facilitate the synthesis of ligand-conjugated dsRNA by the use of nucleoside monomers that have been appropriately conjugated with ligands and that may further be attached to a solid support material. In some embodiments, a dsRNA bearing an aralkyl ligand attached to the 3′-end of the dsRNA is prepared by first covalently attaching a monomer building block to a controlled-pore-glass support via a long-chain aminoalkyl group; then, nucleotides are bonded via standard solid-phase synthesis techniques to the monomer building-block bound to the solid support. The monomer building-block may be a nucleoside or other organic compound that is compatible with solid-phase synthesis.

[0208] In some embodiments, functionalized nucleoside sequences of the present disclosure possessing an amino group at the 5′-terminus are prepared using a polynucleotide synthesizer, and then reacted with an active ester derivative of a selected ligand. Active ester derivatives are well known to one of ordinary skill in the art. The reaction of the amino group and the active ester produces an oligonucleotide in which the selected ligand is attached to the 5′-position through a linking group. The amino group at the 5′-terminus can be prepared utilizing a 5′-amino-modifier C6 reagent. In some embodiments, ligand molecules are conjugated to oligonucleotides at the 5′-position by the use of a ligand-nucleoside phosphoramidite wherein the ligand is linked to the 5′-hydroxy group directly or indirectly via a linker. Such ligand-nucleoside phosphoramidites are typically used at the end of an automated synthesis procedure to provide a ligand-conjugated oligonucleotide bearing the ligand at the 5′-terminus.

[0209] In some embodiments, click chemistry is used to synthesize siRNA conjugates. See, e.g., Astakhova et al., Mol Pharm. (2018) 15(8):2892-9; Mercier et al., Bioconjugate Chem. (2011) 22(1):108-14.

### III. Compositions and Delivery of dsRNAs

[0210] Certain aspects of the present disclosure relate to compositions (e.g., pharmaceutical compositions) comprising a dsRNA as described herein. In some embodiments, the composition further comprises a pharmaceutically acceptable excipient. In some embodiments, the composition is useful for treating a disease or disorder associated with the expression or activity of the LPA gene. In some embodiments, the disease or disorder associated with the expression of the LPA gene is a lipid metabolism disorder such as hypertriglyceridemia and/or any other condition described herein. Compositions of the present disclosure may be formulated based upon the mode of delivery, including, for example, compositions formulated for delivery to the liver via parenteral administration.

[0211] The present dsRNAs can be formulated with a pharmaceutically acceptable excipient. Pharmaceutically acceptable excipients can be liquid or solid, and may be selected with the planned manner of administration in mind so as to provide for the desired bulk, consistency, and other pertinent transport and chemical properties. Any known pharmaceutically acceptable excipient may be used, including, for example, water, saline solution, binding agents (e.g., polyvinylpyrrolidone or hydroxypropyl methylcellulose), fillers (e.g., lactose and other sugars, gelatin, or calcium sulfate), lubricants (e.g., starch, polyethylene glycol, or sodium acetate), disintegrates (e.g., starch or sodium starch glycolate), calcium salts (e.g., calcium sulfate, calcium chloride, calcium phosphate, and hydroxyapatite), and wetting agents (e.g., sodium lauryl sulfate).

[0212] The present dsRNAs can be formulated into compositions (e.g., pharmaceutical compositions) containing the dsRNA admixed, encapsulated, conjugated, or otherwise associated with other molecules, molecular structures, or mixtures of nucleic acids. For example, a composition comprising one or more dsRNAs as described herein can contain other therapeutic agents such as other lipid lowering agents (e.g., statins). In some embodiments, the composition (e.g., pharmaceutical composition) further comprises a delivery vehicle as described herein.

[0213] A dsRNA of the present disclosure may be delivered directly or indirectly. In some embodiments, the dsRNA is delivered directly by administering a pharmaceutical composition comprising the dsRNA to a subject. In some embodiments, the dsRNA is delivered indirectly by administering one or more vectors described below.

[0214] A dsRNA of the present disclosure may be delivered by any method known in the art, including, for example, by adapting a method of delivering a nucleic acid molecule for use with a dsRNA (see, e.g., Akhtar et al., Trends Cell Biol. (1992) 2(5):139-44; PCT Publication WO 94/02595), or via additional methods known in the art (see, e.g., Kanasty et al., Nature Materials (2013) 12:967-77; Wittrup and Lieberman, Nature Reviews Genetics (2015) 16:543-52; Whitehead et al., Nature Reviews Drug Discovery (2009) 8:129-38; Gary et al., J Control Release (2007) 121(1-2):64-73; Wang et al., AAPS J. (2010) 12(4):492-503; Draz et al., Theranostics (2014) 4(9):872-92; Wan et al., Drug Deliv Transl Res. (2013) 4(1):74-83; Erdmann and Barciszewski (eds.) (2010) “RNA Technologies and Their Applications,” Springer-Verlag Berlin Heidelberg, DOI 10.1007/978-3-642-12168-5; Xu and Wang, Asian Journal of Pharmaceutical Sciences (2015) 10(1):1-12). For in vivo delivery, dsRNA can be injected into a tissue site or administered systemically (e.g., in nanoparticle form via inhalation). In vivo delivery can also be mediated by a beta-glucan delivery system (see, e.g., Tesz et al., Biochem J. (2011) 436(2):351-62). In vitro introduction into a cell includes methods known in the art such as electroporation and lipofection.

[0215] In some embodiments, a dsRNA of the present disclosure is delivered by a delivery vehicle comprising the dsRNA. In some embodiments, the delivery vehicle is a liposome, lipoplex, complex, or nanoparticle.

[0216] III.1 Liposomal Formulations

[0217] Liposomes are unilamellar or multilamellar vesicles which have a membrane formed from a lipophilic material and an aqueous interior. In some embodiments, a liposome is a vesicle composed of amphiphilic lipids arranged in a spherical bilayer or bilayers. The aqueous portion contains the composition to be delivered. Cationic liposomes possess the advantage of being able to fuse to the cell wall. Advantages of liposomes include, e.g., that liposomes obtained from natural phospholipids are biocompatible and biodegradable; that liposomes can incorporate a wide range of water and lipid soluble drugs; and that liposomes can protect encapsulated drugs in their internal compartments from metabolism and degradation (Rosoff, in Pharmaceutical Dosage Forms, Lieberman, Rieger and Banker (Eds.), 1988, Marcel Dekker, Inc., New York, N.Y., volume 1, p. 245). Important considerations in the preparation of liposome formulations are the lipid surface charge, vesicle size and the aqueous volume of the liposomes. For example, engineered cationic liposomes and sterically stabilized liposomes can be used to deliver the dsRNA. See, e.g., Podesta et al., Methods Enzymol. (2009) 464:343-54; U.S. Pat. No. 5,665,710.

[0218] III.2 Nucleic Acid-Lipid Particles

[0219] In some embodiments, a dsRNA of the present disclosure is fully encapsulated in a lipid formulation, e.g., to form a nucleic acid-lipid particle such as, without limitation, a SPLP, pSPLP, or SNALP. As used herein, the term “SNALP” refers to a stable nucleic acid-lipid particle, including SPLP. As used herein, the term “SPLP” refers to a nucleic acid-lipid particle comprising plasmid DNA encapsulated within a lipid vesicle. Nucleic acid-lipid particles, e.g., SNALPs, typically contain a cationic lipid, a non-cationic lipid, and a lipid that prevents aggregation of the particle (e.g., a PEG-lipid conjugate). SNALPs and SPLPs are useful for systemic applications, as they exhibit extended circulation lifetimes following intravenous (i.v.) injection and accumulate at distal sites (e.g., sites physically separated from the administration site). SPLPs include “pSPLPs,” which include an encapsulated condensing agent-nucleic acid complex as set forth in PCT Publication WO 00/03683.

[0220] In some embodiments, dsRNAs when present in nucleic acid-lipid particles are resistant in aqueous solution to degradation with a nuclease. Nucleic acid-lipid particles and their methods of preparation are disclosed in, e.g., U.S. Pat. Nos. 5,976,567; 5,981,501; 6,534,484; 6,586,410; and 6,815,432; and PCT Publication WO 96/40964.

[0221] In some embodiments, the nucleic acid-lipid particles comprise a cationic lipid. Any cationic lipid or mixture thereof known in the art may be used. In some embodiments, the nucleic acid-lipid particles comprise a non-cationic lipid. Any non-cationic lipid or mixture thereof known in the art may be used. In some embodiments, the nucleic acid-lipid particle comprises a conjugated lipid (e.g., to prevent aggregation). Any conjugated lipid known in the art may be used.

[0222] III.3 Additional Formulations

[0223] Factors that are important to consider in order to successfully deliver a dsRNA molecule in vivo include: (1) biological stability of the delivered molecule, (2) preventing nonspecific effects, and (3) accumulation of the delivered molecule in the target tissue. The nonspecific effects of a dsRNA can be minimized by local administration, for example by direct injection or implantation into a tissue or topically administering the preparation. For administering a dsRNA systemically for the treatment of a disease, the dsRNA may be modified or alternatively delivered using a drug delivery system; both methods act to prevent the rapid degradation of the dsRNA by endo- and exonucleases in vivo. Modification of the RNA or the pharmaceutical excipient may also permit targeting of the dsRNA composition to the target tissue and avoid undesirable off-target effects. As described above, dsRNA molecules may be modified by chemical conjugation to lipophilic groups such as cholesterol to enhance cellular uptake and prevent degradation. In some embodiments, the dsRNA is delivered using drug delivery systems such as a nanoparticle (e.g., a calcium phosphate nanoparticle), a dendrimer, a polymer, liposomes, or a cationic delivery system. Positively charged cationic delivery systems facilitate binding of a dsRNA molecule (negatively charged) and also enhance interactions at the negatively charged cell membrane to permit efficient uptake of a dsRNA by the cell. Cationic lipids, dendrimers, or polymers can either be bound to a dsRNA, or induced to form a vesicle or micelle (See, e.g., Kim et al., Journal of Controlled Release (2008) 129(2):107-16) that encases a dsRNA. The formation of vesicles or micelles further prevents degradation of the dsRNA when administered systemically. Methods for making and administering cationic-dsRNA complexes are known in the art. In some embodiments, a dsRNA may form a complex with cyclodextrin for systemic administration.

[0224] III.4 Vector-Encoded dsRNAs

[0225] A dsRNA of the present disclosure may be delivered to the target cell indirectly by introducing into the target cell a recombinant vector (DNA or RNA vector) encoding the dsRNA. The dsRNA will be expressed from the vector inside the cell, e.g., in the form of shRNA, where the shRNA is subsequently processed into siRNA intracellularly. In some embodiments, the vector is a plasmid, cosmid, or viral vector. In some embodiments, the vector is compatible with expression in prokaryotic cells. In some embodiments, the vector is compatible with expression in E. coli. In some embodiments, the vector is compatible with expression in eukaryotic cells. In some embodiments, the vector is compatible with expression in yeast cells. In some embodiments, the vector is compatible with expression in vertebrate cells. Any expression vector capable of encoding dsRNA known in the art may be used, including, for example, vectors derived from adenovirus (AV), adeno-associated virus (AAV), retroviruses (e.g., lentiviruses (LV), Rhabdoviruses, murine leukemia virus, etc.), herpes virus, SV40 virus, polyoma virus, papilloma virus, picornavirus, pox virus (e.g., orthopox or avipox), and the like. The tropism of viral vectors or viral-derived vectors may be modified by pseudotyping the vectors with envelope proteins or other surface antigens from one or more other viruses, or by substituting different viral capsid proteins, as appropriate. For example, lentiviral vectors may be pseudotypes with surface proteins from vesicular stomatitis virus (VSV), rabies, Ebola, Mokola, and the like. AAV vectors may be made to target different cells by engineering the vectors to express different capsid protein serotypes. For example, an AAV vector expressing a serotype 2 capsid on a serotype 2 genome is called AAV 2/2. This serotype 2 capsid gene in the AAV 2/2 vector can be replaced by a serotype capsid gene to produce an AAV 2/5 vector. Techniques for constructing AAV vectors which express different capsid protein serotypes have been described previously (see, e.g., Rabinowitz et al., J. Virol. (2002) 76:791-801).

[0226] Selection of recombinant vectors, methods for inserting nucleic acid sequences into the vector for expressing a dsRNA, and methods of delivering vectors into one or more cells of interest are known in the art. See, e.g., Domburg, Gene Therap. (1995) 2:301-10; Eglitis et al., Biotechniques (1998) 6:608-14; Miller, Hum Gene Therap. (1990) 1:5-14; Anderson et al., Nature (1998) 392:25-30; Xia et al., Nat. Biotech. (2002) 20:1006-10; Robinson et al., Nat Genet. (2003) 33:401-6; Samulski et al., J. Virol. (1987) 61:3096-101; Fisher et al., J Virol. (1996) 70:520-32; Samulski et al., J Virol. (1989) 63:3822-6; U.S. Pat. Nos. 5,252,479 and 5,139,941; and PCT Publications WO 94/13788 and WO 93/24641.

[0227] Vectors useful for the delivery of a dsRNA as described herein may include regulatory elements (e.g., heterologous promoter, enhancer, etc.) sufficient for expression of the dsRNA in the desired target cell or tissue. In some embodiments, the vector comprises one or more sequences encoding the dsRNA linked to one or more heterologous promoters. Any heterologous promoter known in the art capable of expressing a dsRNA may be used, including, for example, the U6 or H1 RNA pol III promoters, the T7 promoter, and the cytomegalovirus promoter. The one or more heterologous promoters may be an inducible promoter, a repressible promoter, a regulatable promoter, and/or a tissue-specific promoter. Selection of additional promoters is within the abilities of one of ordinary skill in the art. In some embodiments, the regulatory elements are selected to provide constitutive expression. In some embodiments, the regulatory elements are selected to provide regulated/inducible/repressible expression. In some embodiments, the regulatory elements are selected to provide tissue-specific expression. In some embodiments, the regulatory elements and sequence encoding the dsRNA form a transcription unit.

[0228] A dsRNA of the present disclosure may be expressed from transcription units inserted into DNA or RNA vectors (see, e.g., Couture et al., TIG (1996) 12:5-10; PCT Patent Publications WO 00/22113 and WO 00/22114; and U.S. Pat. No. 6,054,299). Expression may be transient (on the order of hours to weeks) or sustained (weeks to months or longer), depending upon the specific construct used and the target tissue or cell type. These transgenes can be introduced as a linear construct, a circular plasmid, or a viral vector, which can be an integrating or non-integrating vector. The transgene can also be constructed to permit it to be inherited as an extrachromosomal plasmid (Gassmann et al., PNAS (1995) 92:1292).

[0229] In some embodiments, the sense and antisense strands of a dsRNA are encoded on separate expression vectors. In some embodiments, the sense and antisense strands are expressed on two separate expression vectors that are co-introduced (e.g., by transfection or infection) into the same target cell. In some embodiments, the sense and antisense strands are encoded on the same expression vector. In some embodiments, the sense and antisense strands are transcribed from separate promoters which are located on the same expression vector. In some embodiments, the sense and antisense strands are transcribed from the same promoter on the same expression vector. In some embodiments, the sense and antisense strands are transcribed from the same promoter as an inverted repeat joined by a linker polynucleotide sequence such that the dsRNA has a stem and loop structure.

### IV. dsRNA Therapy

[0230] Certain aspects of the present disclosure relate to methods for inhibiting the expression of the LPA gene in a subject (e.g., a primate subject such as a human) comprising administering a therapeutically effective amount of one or more dsRNAs of the present disclosure, one or more vectors of the present disclosure, or one or more pharmaceutical compositions of the present disclosure. Certain aspects of the present disclosure relate to methods of treating and/or preventing one or more conditions described herein (e.g., an Lp(a)-associated condition such as a cardiovascular disease (CVD) including atherosclerosis, peripheral artery disease, aortic valve calcification, thrombosis, or stroke), comprising administering one or more dsRNAs of the present disclosure and/or one or more vectors of the present disclosure and/or one or more pharmaceutical compositions comprising one or more dsRNAs as described herein. In some embodiments, downregulating LPA expression in a subject alleviates one or more symptoms of a condition described herein (e.g., a high Lp(a)-associated condition such as a CVD) in the subject.

[0231] The pharmaceutical composition of the present disclosure may be administered in dosages sufficient to inhibit expression of the LPA gene. In some embodiments, a suitable dose of a dsRNA described herein is in the range of 0.001 mg/kg-200 mg/kg body weight of the recipient. In certain embodiments, a suitable dose is in the range of 0.001 mg/kg-50 mg/kg body weight of the recipient, e.g., in the range of 0.001 mg/kg-20 mg/kg body weight of the recipient. Treatment of a subject with a therapeutically effective amount of a pharmaceutical composition can include a single treatment or a series of treatments.

[0232] As used herein, the terms “therapeutically effective amount” and “prophylactically effective amount” refer to an amount that provides a therapeutic benefit in the treatment, prevention, or management of pathological processes mediated by LPA expression, or an overt symptom of pathological processes mediated by LPA expression.

[0233] As used herein, the term “Lp(a)-associated condition” or “high Lp(a)-associated condition” is intended to include any condition in which decreasing the plasma concentration of Lp(a) is beneficial. Such a condition may be caused, for example, by excessive production of Lp(a), production of certain apo(a) isoforms linked to diseased conditions, LPA gene mutations that increase Lp(a) levels, abnormal apo(a) cleavage that leads to increased levels, or decreased degradation and clearance, and/or abnormal interactions between Lp(a) and other proteins or other endogenous or exogenous substances (e.g., plasminogen receptor) such that Lp(a) level is increased or degradation is decreased. A Lp(a)-associated condition may be, e.g., a cardiovascular disease. A condition associated with high Lp(a) levels may be relatively insensitive to life style changes and common statin drugs, and are therefore hard to treat. An Lp(a) associated condition as defined herein may be selected from lipidemia (e.g., hyperlipidemia), dyslipidemia (e.g., atherogenic dyslipidemia, diabetic dyslipidemia, or mixed dyslipidemia), hyperlipoproteinemia, hyperapobetalipoproteinemia, coronary artery disease, myocardial infarction, peripheral artery disease, metabolic syndrome, acute coronary syndrome, aortic valve stenosis, aortic valve calcification, aortic valve regurgitation, aortic dissection, retinal artery occlusion, cerebrovascular disease, mesenteric ischemia, superior mesenteric artery occlusion, restenosis, renal artery stenosis, angina, cerebrovascular atherosclerosis, cerebrovascular disease, and venous thrombosis.

[0234] In some embodiments, a dsRNA described herein is used to treat a subject with a cardiovascular disease (CVD) such as chronic heart disease (CHD) or any symptoms or conditions associated with a CVD. In certain embodiments, a dsRNA described herein is used to treat a patient with hypercholesterolemia (e.g., statin-resistant hypercholesterolemia, and heterozygous or homozygous familial hypercholesterolemia) myocardial infarction (MI), peripheral arterial disease (PAD), calcific aortic valve disease (CAVD), atherosclerotic cardiovascular disease (ASCVD), atherosclerosis, dyslipidemia, thrombosis, or stroke.

[0235] In some embodiments, a dsRNA described herein is used to treat a subject having one or more conditions selected from: lipidemia (e.g., hyperlipidemia), dyslipidemia (e.g., atherogenic dyslipidemia, diabetic dyslipidemia, or mixed dyslipidemia), hyperlipoproteinemia, hyperapobetalipoproteinemia, coronary artery disease, metabolic syndrome, acute coronary syndrome, aortic valve stenosis, aortic valve calcification, aortic valve regurgitation, aortic dissection, retinal artery occlusion, cerebrovascular disease, mesenteric ischemia, superior mesenteric artery occlusion, restenosis, renal artery stenosis, angina, cerebrovascular atherosclerosis, cerebrovascular disease, and venous thrombosis.

[0236] In some embodiments, a dsRNA described herein may be used to manage body weight or reduce fat mass in a subject.

[0237] In some embodiments, a dsRNA as described herein inhibits expression of the human LPA gene, or both human and cynomolgus LPA genes. The expression of the LPA gene in a subject may be inhibited, or Lp(a) levels in the subject may be reduced, by at least about 20%, at least about 25%, at least about 30%, at least about 35%, at least about 40%, at least about 45%, at least about 50%, at least about 55%, at least about 60%, at least about 65%, at least about 70%, at least about 75%, at least about 80%, at least about 85%, at least about 90%, at least about 95%, at least about 99%, or about 100% after treatment as compared to pretreatment levels. In some embodiments, expression of the LPA gene is inhibited, or Lp(a) levels in the subject may be reduced, by at least about 2, at least about 5, at least about 10, at least about 15, at least about 20, at least about 25, at least about 50, at least about 75, or at least about 100-fold after treatment as compared to pretreatment levels. In some embodiments, the LPA gene is inhibited, or Lp(a) levels are reduced, in the liver of the subject.

[0238] In some embodiments, expression of the LPA gene is decreased by the dsRNA for about 12 or more, 24 or more, or 36 or more hours. In some embodiments, expression of the LPA gene is decreased for an extended duration, e.g., at least about two, three, four, five, or six days or more, e.g., about one week, two weeks, three weeks, or four weeks or longer.

[0239] As used herein, the terms “inhibit the expression of” or “inhibiting expression of,” insofar as they refer to the LPA gene, refer to at least partial suppression of expression of the LPA gene, as manifested by a reduction in the amount of mRNA transcribed from the LPA gene in a first cell or group of cells treated such that expression of the LPA gene is inhibited, as compared to a second cell or group of cells substantially identical to the first cell or group of cells but which has or have not been so treated (control cells). Such inhibition can be assessed, e.g., by Northern analysis, in situ hybridization, B-DNA analysis, expression profiling, transcription of reporter constructs, and other techniques known in the art. As used herein, the term “inhibiting” is used interchangeably with “reducing,” “silencing,” “downregulating,” “suppressing,” and other similar terms, and include any level of inhibition. The degree of inhibition is usually expressed in terms of (((mRNA in control cells)−(mRNA in treated cells))/(mRNA in control cells))×100%.

[0240] Alternatively, the degree of inhibition may be given in terms of a reduction of a parameter that is functionally linked to LPA gene transcription, e.g., the amount of protein encoded by the LPA gene in a cell (as assessed, e.g., by Western analysis, expression of a reporter protein, ELISA, immunoprecipitation, or other techniques known in the art), or the number of cells displaying a certain phenotype, e.g., apoptosis. In principle, LPA gene silencing may be determined in any cell expressing the target, either constitutively or by genomic engineering, and by any appropriate assay. However, when a reference is needed in order to determine whether a given dsRNA inhibits the expression of the LPA gene by a certain degree and therefore is encompassed by the present disclosure, the assays provided in the Examples below shall serve as such a reference.

[0241] A dsRNA or pharmaceutical composition described herein may be administered by any means known in the art, including, without limitation, oral or parenteral routes, including intravenous, intramuscular, subcutaneous, pulmonary, transdermal, and airway (aerosol) administration. Typically, when treating a patient with hypercholesterolemia or another CVD condition, the dsRNA molecules are administered systemically via parenteral means. In some embodiments, the dsRNAs and/or compositions are administered by subcutaneous administration. In some embodiments, the dsRNAs and/or compositions are administered by intravenous administration. In some embodiments, the dsRNAs and/or compositions are administered by pulmonary administration.

[0242] As used herein, in the context of LPA expression, the terms “treat,” “treatment” and the like refer to relief from or alleviation of pathological processes mediated by target gene expression. In the context of the present disclosure, insofar as it relates to any of the conditions recited herein, the terms “treat,” “treatment,” and the like refer to relieving or alleviating one or more symptoms associated with said condition. As used herein, to “alleviate” a disease, disorder or condition means reducing the severity and/or occurrence frequency of the symptoms of the disease, disorder, or condition. Further, references herein to “treatment” include references to curative, palliative and prophylactic treatment.

[0243] As used herein, the terms “prevent” or “delay progression of” (and grammatical variants thereof), with respect to a condition relate to prophylactic treatment of a condition, e.g., in an individual suspected to have or be at risk for developing the condition. Prevention may include, but is not limited to, preventing or delaying onset or progression of the condition and/or maintaining one or more symptoms of the disease at a desired or sub-pathological level.

[0244] It is understood that the dsRNAs of the present disclosure may be for use in a treatment as described herein, may be used in a method of treatment as described herein, and/or may be for use in the manufacture of a medicament for a treatment as described herein.

[0245] In some embodiments, a dsRNA of the present disclosure is administered in combination with one or more additional therapeutic agents, such as other siRNA therapeutic agents, monoclonal antibodies, and small molecules, to provide a greater improvement to the condition of the patient than administration of the dsRNA alone. In certain embodiments, the additional therapeutic agent provides an anti-inflammatory effect. In certain embodiments, the additional therapeutic agent is an agent that treats hypertriglyceridemia, such as a lipid-lowering agent.

[0246] In some embodiments, the additional agent may be one or more of a PCSK9 inhibitor, an HMG-CoA reductase inhibitor (e.g., a statin), an ANGPTL3 or ANGPTL8 inhibitor, a fibrate, a bile acid sequestrant, niacin (nicotinic acid), an antiplatelet agent, an angiotensin converting enzyme inhibitor, an angiotensin II receptor antagonist (e.g., losartan potassium), an acyl-CoA cholesterol acetyltransferase (ACAT) inhibitor, a cholesterol absorption inhibitor, a cholesterol ester transfer protein (CETP) inhibitor, a microsomal triglyceride transfer protein (MTTP) inhibitor, a cholesterol modulator, a bile acid modulator, a peroxisome proliferation activated receptor (PPAR) agonist, an omega-3 fatty acid (e.g., fish oil or flaxseed oil), and insulin or an insulin analog. Particular examples include, without limitation, atorvastatin, pravastatin, simvastatin, lovastatin, fluvastatin, cerivastatin, rosuvastatin, pitavastatin, ezetimibe, bezafibrate, clofibrate, fenofibrate, gemfibrozil, ciprofibrate, cholestyramine, colestipol, colesevelam, and niacin.

[0247] In certain embodiments, a dsRNA as described herein may be administered in combination with another therapeutic intervention such as lipid lowering, weight loss, dietary modification, and/or moderate exercise.

[0248] Genetic predisposition plays a role in the development of target gene associated diseases, e.g., high Lp(a) levels. Therefore, a subject in need of treatment with one or more dsRNAs of the present disclosure may be identified by taking a family history, or, for example, screening for one or more genetic markers or variants, in particular Lp(a) KIV2 polymorphism. In certain embodiments, a subject in need of treatment with one or more dsRNAs of the present disclosure may be identified by screening for variants in any of these genes or any combination thereof.

[0249] A healthcare provider, such as a doctor, nurse, or family member, can take a family history before prescribing or administering a dsRNA of the present disclosure. In addition, a test may be performed to determine a genotype or phenotype. For example, a DNA test or an apo(a) isoform separation test may be performed on a sample from the subject, e.g., a blood sample, to identify the LPA genotype and the circulating Lp(a) phenotype before the dsRNA is administered to the subject.

### V. Kits and Articles of Manufacture

[0250] Certain aspects of the present disclosure relate to an article of manufacture or a kit comprising one or more of the dsRNAs, vectors, or compositions (e.g., pharmaceutical compositions) as described herein useful for the treatment and/or prevention of a high Lp(a)-associated condition (e.g., a peripheral artery disease, atherosclerosis, or aortic valve calcification). The article of manufacture or kit may further comprise a container and a label or package insert on or associated with the container. Suitable containers include, for example, bottles, vials, syringes, IV solution bags, etc. The containers may be formed from a variety of materials such as glass or plastic. The container holds a composition which is by itself or combined with another composition effective for treating or preventing the disease and may have a sterile access port (for example the container may be an intravenous solution bag or a vial having a stopper pierceable by a hypodermic injection needle). At least one active agent in the composition is a dsRNA as described herein. The label or package insert indicates that the composition is used for treating a high Lp(a)-associated condition. In some embodiments, the condition is a CVD and/or another condition described herein. Moreover, the article of manufacture or kit may comprise (a) a first container with a composition contained therein, wherein the composition comprises a dsRNA as described herein; and (b) a second container with a composition contained therein, wherein the composition comprises a second therapeutic agent (e.g., an additional agent as described herein). The article of manufacture or kit in this aspect of the present disclosure may further comprise a package insert indicating that the compositions can be used to treat a particular disease. Alternatively, or additionally, the article of manufacture or kit may further comprise a second (or third) container comprising a pharmaceutically-acceptable buffer, such as bacteriostatic water for injection (BWFI), phosphate-buffered saline, Ringer's solution and dextrose solution. It may further include other materials desirable from a commercial and/or user standpoint, including other buffers, diluents, filters, needles, and syringes.

[0251] Unless otherwise defined herein, scientific and technical terms used in connection with the present disclosure shall have the meanings that are commonly understood by those of ordinary skill in the art. Exemplary methods and materials are described below, although methods and materials similar or equivalent to those described herein can also be used in the practice or testing of the present disclosure. In case of conflict, the present specification, including definitions, will control.

[0252] Generally, nomenclature used in connection with, and techniques of, cell and tissue culture, molecular biology, immunology, microbiology, genetics, analytical chemistry, synthetic organic chemistry, medicinal and pharmaceutical chemistry, and protein and nucleic acid chemistry and hybridization described herein are those well-known and commonly used in the art. Enzymatic reactions and purification techniques are performed according to the manufacturer's specifications, as commonly accomplished in the art or as described herein.

[0253] Further, unless otherwise required by context, singular terms shall include pluralities and plural terms shall include the singular. Throughout this specification and embodiments, the words “have” and “comprise,” or variations such as “has,” “having,” “comprises,” or “comprising,” will be understood to imply the inclusion of a stated integer or group of integers but not the exclusion of any other integer or group of integers.

[0254] All publications and other references mentioned herein are incorporated by reference in their entirety. Although a number of documents are cited herein, this citation does not constitute an admission that any of these documents form part of the common general knowledge in the art.

### EXAMPLES

[0255] In order for the present disclosure to be better understood, the following examples are set forth. These examples are for illustration only and are not to be construed as limiting the scope of the present disclosure in any manner.

### Example 1: siRNA Synthesis and Purification

[0256] siRNAs, including non-targeting control siRNAs (NT control), were produced using solid phase oligonucleotide synthesis.

[0257] An LPA siRNA screening library comprising 299 19-mer LPA siRNA sequences with G+C content was designed to fully match the human mRNA transcript (NM_005577.2) with maximum one mismatch allowed to the orthologous cynomolgus mRNA sequence (XM_015448517). These LPA siRNA sequences comprise a fixed pattern of 2′-O-methyl and 2′-fluoro modified nucleotides (Table 1). All sense and antisense strand sequences were in silico profiled against the human RefSeq RNA database version 2016-02-23. Off-target transcripts with RNA-Seq expression (Illumina Body Atlas) FPKM<0.5 in human liver tissue were not considered. The only exception represents the LPAL2 pseudogene where off-target hits were accepted. siRNA sequences with >2 mismatches to any other potential human off-target transcript expressed in human liver were used for the library design.

[0258] Unconjugated LPA siRNAs, including non-targeting control siRNAs (“LV2” and “LV3”), were synthesized at a scale of 1 μmol (in vitro) or 10 μmol (in vivo) on a ABI 394 DNA/RNA or BioAutomation MerMade 12 synthesizer using commercially available 5′-O-DMT-3′-O-(2-cyanoethyl-N,N-diisopropyl) phosphoramidite monomers (SAFC) of uridine, 4-N-acetylcytidine (C^{Ac}), 6-N-benzoyladenosine (A B z) and 2-N-isobutyrylguanosine (G′ B ‘) with 2’- or 2′-F modification, and the solid supports 5′-O-DMT-thymidine-CPG and 3′-O-DMT-thymidine-CPG (invdT, Link) following standard protocols for solid phase synthesis and deprotection (Beaucage, Curr Opi Drug Discov Devel. (2008) 11:203-16; Mueller et al., Curr Org Synth. (2004) 1:293-307).

[0259] Phosphoramidite building blocks were used as 0.1 M solutions in acetonitrile and activated with 5-(bis-3,5-trifluoromethylphenyl)-1H-tetrazole (activator 42, 0.25 M in acetonitrile, Sigma Aldrich). Reaction times of 300 s were used for the phosphoramidite couplings. As capping reagents, acetic anhydride in THF (CapA for ABI, Sigma Aldrich) and N-methylimidazole in THF (CapB for ABI, Sigma Aldrich) were used. As oxidizing reagent, iodine in THF/pyridine/water (0.02 M; oxidizer for ABI, Sigma Aldrich) was used. Deprotection of the DMT-protecting group was done using dichloroacetic acid in DCM (DCA deblock, Sigma Aldrich). Final cleavage from solid support and deprotection (acyl- and cyanoethyl-protecting groups) was achieved with NH₃ (32% aqueous solution/ethanol, v/v 3:1).

[0260] The crude oligonucleotides were analyzed by IEX and LC-MS, and purified by anion-exchange high-performance liquid chromatography (IEX-HPLC) using a linear gradient of 10-65% buffer B in 30 min. ÄKTA purifier (Thermo Fisher Scientific DNAPac PA200 semi prep ion exchange column, 8 μm particles, width 22 mm×length 250 mm).
[0261] Buffer A: 1.50 l H₂O, 2.107 g NaClO₄, 438 mg EDTA, 1.818 g TRIS, 540.54 g urea, pH 7.4.
[0262] Buffer B: 1.50 l H₂O, 105.34 g NaClO₄, 438 mg EDTA, 1.818 g TRIS, 540.54 g urea, pH 7.4.

[0263] Isolation of the oligonucleotides was achieved by precipitation, induced by the addition of 4 volumes of ethanol and storing at −20° C.

[0264] To ensure high fidelity of the data, all single strands were HPLC purified to >85% purity. The purity and identity of the oligonucleotides was confirmed by ion exchange chromatography and LC-MS, respectively.

[0265] Positive control LPA siRNAs s8263 and s8264 were purchased from Ambion (now Thermo Fisher Scientific).

[0266] For the in vitro and in vivo experiments, stock solutions (100 μM and 10 mg/ml, respectively) of siRNAs in PBS were prepared by mixing equimolar amounts of complementary sense and antisense strands in 1×PBS buffer. The solutions were heated to 90° C. for 10 min and allowed to slowly cool to room temperature to complete the annealing process. siRNAs were further characterized by HPLC and were stored frozen until use.

[0267] siRNA Sequences

[0268] The sequences of each siRNA, and sequences including nucleotide modifications, are shown in Tables 1, 2, 3, and 4, supra.

### Example 2: Identification of siRNAs for Inhibition of Human LPA Expression

[0269] Methods

[0270] Cells and Tissue Culture

[0271] Human Hep3B cells were grown at 37° C., 5% CO₂ and 95% RH, and cultivated in EMEM medium (ATCC®, cat. no. 30-2003™) supplemented with 10% FBS.

[0272] Human HuH-7 cells were grown at 37° C., 5% CO₂ and 95% RH, and cultivated in MEM medium (ThermoFisher, cat. no. 41090) supplemented with 1×NEAA (ThermoFisher, cat. no. 11140035), 1% sodium pyruvate (Sigma, cat. no. S8636) and 10% FBS.

[0273] HepG2 cells stably overexpressing a pmirGLO-LPA dual luciferase reporter plasmid (see below) were grown at 37° C., 5% CO₂ and 95% RH, and cultivated in MEM medium (ThermoFisher, cat. no. 41090) supplemented with 1×NEAA (ThermoFisher, cat. no. 11140035), 1% sodium pyruvate (Sigma, cat. no. S8636), 10% FBS and 600 μg/ml G418 sulfate (Geneticin™ Selective Antibiotic; ThermoFisher, cat. no. 10131035).

[0274] HepG2 cells stably overexpressing a human LPA cDNA construct (Brunner et al., Proc Natl Acad Sci. (1993) 90(24):11643-7) were grown at 37° C., 5% CO₂ and 95% RH, and cultivated in DMEM/F12 medium (Lonza, cat. no. BE12-719F) supplemented with 10% FBS.

[0275] Primary human (BioreclamationlVT, cat. no. M00995-P) and cynomolgus (Primacyt, cat. no. CHCP-I-T) hepatocytes were cultured as follows: cryopreserved cells were thawed and plated using a plating and thawing kit (Primacyt, cat. no. PTK-1), and were incubated at 37° C., 5% CO₂ and 95% RH. 6 hours after plating, the medium was changed to maintenance medium (KaLy-Cell, cat. no. KLC-MM) supplemented with 1% FBS.

[0276] Primary hepatocytes from female apo(a) transgenic mice (see below) were isolated freshly before the experiments based on a protocol adapted from Seglen, P. O. (1976): Preparation of Isolated Rat Liver Cells; Methods in Cell Biology, 13: 29-83. Plating of isolated hepatocytes was done for 3-5 hours at 37° C., 5% CO₂ and 95% RH in Williams' E medium (Thermo Fisher, cat. no. 22551) supplemented with 2 mM glutamine (Thermo Fisher, cat. no. 25030), 100 U/ml Penicillin-Streptomycin (Thermo Fisher, cat. no. 15140), 1 μg/ml Dexamethason (Sigma, cat. no. D1756), 1×ITS solution (Thermo Fisher, cat. no. 41400), and 5% FBS. After plating, the medium was changed to cultivation medium that was identical to plating medium except for the addition of 1% FBS. No further medium change was done during the incubation period of 48 or 72 hours.

[0277] pmirGLO Dual Luciferase Reporter Assay

[0278] For siRNA screening purposes, the full-length human LPA cDNA sequence (NM_005577.2) was sub-cloned into the multiple cloning site of a commercially available, dual luciferase reporter-based pmirGLO screening plasmid (Promega, cat. no. E1330) which generated a Firefly luciferase/LPA fusion mRNA. For transient plasmid transfections, 45 μg of the pmirGLO-LPA plasmid was transfected in a fast-forward setup for 18 hours into 18 mio. Hep3B cells in T225 flasks (Falcon®, cat. no. 353138) using FuGene® HD transfection reagent (Promega, cat. no. E2311). 1 nM and 10 nM siRNA transfections of 5000 plasmid pre-transfected Hep3B cells per well in 384 well plates (Greiner-Bio CELLSTAR®, cat. no. 781098) using Lipofectamine™ RNAiMAX (ThermoFisher, cat. no. 13778150) was done next day in a reverse setup and cells were incubated for 48 hours. Gene knockdown was determined by measuring Firefly luciferase levels normalized to the levels of constitutively-expressed Renilla luciferase, also encoded by the pmirGLO plasmid, using the Dual-Glo® Luciferase Assay (Promega, cat. no. E2940).

[0279] IC₅₀ Measurements

[0280] For IC₅₀ experiments with the pmirGLO-LPA reporter plasmid in a stable HepG2 cell clone, 2 μg of Cla-I linearized pmirGLO-LPA plasmid was transfected per well in Collagen-I coated 6-well plates (BD, cat. no. 356400) using 80-90% confluent HepG2 cells and FuGene HD transfection reagent in a 3.5:1 ratio (μl FuGene HD vs. μg plasmid). Polyclonal cells were expanded in Collagen-I coated T75 flasks (Corning, cat. no. 356485) by adding 600 μg/ml G418 to the culture medium, and single cell cloned in Collagen-I coated 384-well plates (Corning, cat. no. 354664) using an IncuCyte® ZOOM Live-Cell Imaging System (Essen BioScience). Single cell clones were characterized by qPCR analysis for LPA expression levels (see below) as well as relative Firefly and Renilla luciferase abundance.

[0281] For IC₅₀ measurements with a transfection reagent, 30,000 primary transgenic apo(a) mouse hepatocytes in Collagen-I coated human Hep3B cells in 96-well plates were transfected with Lipofectamine™ RNAiMAX in a fast-forward setup for 72 hours with the indicated LPA siRNAs at 7 concentrations starting from 25 nM-0.1 pM using 8-fold dilution steps. The half maximal inhibitory concentration (IC₅₀) for each siRNA was determined by nonlinear regression using iterative fitting procedures developed on SAS9.4 software. Results were obtained using the 4-parameter logistic model according to Ratkovsky and Reedy (Biometrics (1986) 42(3):575-82). The adjustment was obtained by non-linear regression using the Levenberg-Marquardt algorithm in SAS software.

[0282] IC₅₀ values using the stable HepG2-pmirGLO-LPA cell clone were generated as follows: 5000 cells per well in Collagen-I coated 384 well plates were reverse transfected with Lipofectamine™ RNAiMAX and LPA siRNA reagents for 48 hours at 9 concentrations ranging from 40 nM-0.6 pM using 4-fold dilution steps.

[0283] siRNA Transfections

[0284] For knockdown experiments in HepG2-LPA and HuH-7 cells, 17,000 and 25,000 cells/well were used in Collagen-I coated (Corning® Biocoat™, cat. no. 356407) and non-coated 96-well plates (Greiner CELLSTAR®, cat. no. 655180), respectively. For knockdown experiments in primary human, cynomolgus, and transgenic apo(a) mouse hepatocytes, 40,000-50,000 cells/well were used in Collagen-I coated 96-well plates. The cells were transfected with LPA siRNAs at 1 or 10 nM using 0.2 μL/well of Lipofectamine™ RNAiMAX transfection reagent (Thermo Fisher) according to the manufacturer's protocol in a reverse (HepG2-LPA) or fast-forward (primary hepatocytes) transfection setup, and incubated for 48-72 h without medium change. Usually, N=4 technical replicates were carried out per test sample.

[0285] mRNA Expression Analysis

[0286] 48 or 72 hours after siRNA transfection or free siRNA uptake, the cellular RNA was harvested by usage of Promega's SV96 total RNA isolation system (cat. no. Z3500) according to the manufacturer's protocol, including a DNase step during the procedure.

[0287] For cDNA synthesis, the ThermoFisher TaqMan™ Reverse Transcriptase kit (cat. no. N8080234) was used. cDNA was synthesized from 30 ng RNA using 1.2 μL 10×RT buffer, 2.64 μL MgCl₂ (25 mM), 2.4 μL dNTPs (10 mM), 0.6 μL random hexamers (50 μM), 0.6 μL Oligo(dT)16 (SEQ ID NO: 1631) (50 μM), 0.24 μL RNase inhibitor (20 U/μL) and 0.3 μL Multiscribe™ (50 U/μL) in a total volume of 12 μL. Samples were incubated at 25° C. for 10 minutes and 42° C. for 60 minutes. The reaction was stopped by heating to 95° C. for 5 minutes.

[0288] Human and cynomolgus LPA mRNA levels were quantified by qPCR using the ThermoFisher TaqMan™ Universal PCR Master Mix (cat. no. 4305719) and the following TaqMan Gene Expression assays:

| | LPA | PLG |
|---|---|---|
| Human | Hs00916691_m1 | Hs00264877_m1 |
| | Hs00534377_m1 | |
| Cynomolgus | Rh02789265_m1 | Mf02789292_m1 |

[0289] PCR was performed in technical duplicates with an ABI Prism 7900 system under the following PCR conditions: 2 minutes at 50° C., 10 minutes at 95° C., 40 cycles with 95° C. for 15 seconds and 1 minute at 60° C. PCR was set up as a simplex PCR detecting the target gene in one reaction and the housekeeping gene (human/cynomolgus RPL37A) for normalization in a parallel reaction. The final volume for the PCR reaction was 12.5 μL in a 1×PCR master mix; RPL37A primers were used at a final concentration of 50 nM and the probe was used at a final concentration of 200 nM. The ΔΔCt method was applied to calculate relative expression levels of the target transcripts. Percentage of target gene expression was calculated by normalization based on the levels of the LV2 or LV3 non-silencing siRNA control sequence.

[0290] Cytotoxicity Measurement

[0291] Cytotoxicity was measured 72 hours after 5 nM and 50 nM siRNA transfections of a culture of 20,000 HepG2-LPA cells per 96-well by determining the ratio of cellular viability/toxicity in each sample. Cell viability was measured by determination of the intracellular ATP content using the CellTiter-Glo assay (Promega, cat. no. G7570) according to the manufacturer's protocol. Cell toxicity was measured in the supernatant using the ToxiLight assay (Lonza, cat. no. LT07-217) according to the manufacturer's protocol. AllStars Hs Cell Death siRNA (Qiagen, cat. no. SI04381048), 25 μM Ketoconazole (Calbiochem, cat. no. 420600) and 1% Triton X-100 (Sigma, cat. no. T9284) were used as positive controls.

[0292] Results

[0293] As shown in FIGS. 1A and 1B, transient transfection of Hep3B cells with the pmirGLO-LPA plasmid followed by transfection of the LPA siRNA library with said Hep3B cells at 1 or 10 nM correlated very well with correlation coefficients of R₂=0.78 (1 nM LPA siRNA) and R₂=0.74 (10 nM LPA siRNA). FIGS. 1A and 1B also demonstrate the identification of highly potent LPA siRNA reagents. Only a small fraction of LPA siRNA sequences exhibited knockdown activities>75% (1 nM siRNA concentration) and >85% (10 nM siRNA concentration). 34 active LPA siRNA reagents with only a single 100% matching site within the human LPA mRNA sequence were selected for further characterization using in vitro assays.

[0294] IC₅₀ and Iₘₐₓ values of the 34 selected LPA siRNAs from two independent experiments are depicted in Table 5.

TABLE 5
Activity of selected siRNAs in HepG2
cells transfected with pmirGLO-LPA

| | |
|---|---|
| Experiment 1 | Experiment 2 |

| Compound | Iₘₐₓ % | IC₅₀ [nM] | Iₘₐₓ % | IC₅₀ [nM] |
|---|---|---|---|---|
| siLPA#0004 | 92.6 | 0.546 | 93.1 | 0.481 |
| siLPA#0007 | 87.4 | 0.376 | 93.2 | 0.299 |
| siLPA#0019 | 80.8 | 0.943 | 90.4 | 1.09 |
| siLPA#0059 | 93.6 | 0.554 | 92.6 | 0.274 |
| siLPA#0102 | 81.3 | 0.388 | 86.3 | 0.578 |
| siLPA#0103 | 83.1 | 8.96 | 90.4 | 22.5 |
| siLPA#0104 | 96.3 | 0.239 | 94.5 | 0.285 |
| siLPA#0105 | 85.0 | 1.66 | 94.1 | 4.78 |
| siLPA#0107 | 94.4 | 0.384 | 95.3 | 0.733 |
| siLPA#0108 | 85.2 | 0.269 | 90.3 | 0.774 |
| siLPA#0109 | 88.7 | 1.28 | 87.4 | 5.76 |
| siLPA#0110 | 90.8 | 0.475 | 93.0 | 5.92 |
| siLPA#0111 | 91.9 | 0.272 | 91.8 | 2.13 |
| siLPA#0138 | 87.9 | 0.752 | 86.9 | 1.08 |
| siLPA#0141 | 77.5 | 0.595 | 88.9 | 1.75 |
| siLPA#0168 | 78.3 | 0.886 | 90.4 | 1.30 |
| siLPA#0169 | 84.1 | 1.63 | 92.9 | 0.780 |
| siLPA#0172 | 92.0 | 0.115 | 96.3 | 0.684 |
| siLPA#0174 | 84.5 | 1.11 | 86.1 | 1.2 |
| siLPA#0200 | 90.8 | 0.865 | 89.5 | 0.228 |
| siLPA#0204 | 83.6 | 1.19 | 87.2 | 0.740 |
| siLPA#0208 | 93.4 | 1.24 | 84.7 | 1.38 |
| siLPA#0214 | 88.2 | 4.33 | 91.0 | 4.71 |
| siLPA#0217 | 76.0 | 5.06 | 83.0 | 3.13 |
| siLPA#0220 | 78.6 | 1.31 | 88.2 | 0.969 |
| siLPA#0221 | 92.5 | 0.955 | 89.9 | 0.848 |
| siLPA#0223 | 95.2 | 0.534 | 96.5 | 0.502 |
| siLPA#0224 | 81.3 | 1.7 | 87.7 | 0.861 |
| siLPA#0228 | 88.7 | 0.268 | 88.7 | 0.687 |
| siLPA#0277 | 79.9 | 0.823 | 88.8 | 1.39 |
| siLPA#0279 | 92.1 | 0.521 | 91.3 | 0.471 |
| siLPA#0282 | 78.6 | 1.61 | 86.5 | 0.394 |
| siLPA#0296 | 74.3 | 3.46 | 85.3 | 1.96 |
| siLPA#0298 | 90.4 | 0.656 | 91.1 | 0.913 |

[0295] The 34 selected siRNAs were further evaluated for LPA mRNA knockdown activity in HepG2-LPA cells stably overexpressing a human LPA cDNA construct (FIG. 2A). This cell line was identified as being not suitable for the characterization of all LPA siRNAs regarding mRNA knockdown activity because the cDNA clone misses the last 196 nucleotides of the 3′ untranslated region (UTR) of the human LPA mRNA (NM_005577.2) (Brunner et al., Proc Natl Acad Sci. (1993) 90(24):11643-7). Therefore, the 34 LPA siRNA reagents were further investigated for LPA mRNA knockdown activity in primary transgenic apo(a) mouse hepatocytes (FIG. 2B) and in primary cynomolgus hepatocytes (FIG. 2C).

[0296] The specificity of the 34 selected LPA siRNAs was evaluated by assessing their ability to repress the mRNA expression levels of human plasminogen, the closest protein-coding orthologue of apo(a). PLG mRNA levels were determined in the human HuH-7 cell line (FIG. 3A) as well as in primary human (FIG. 3B) and cynomolgus (FIG. 3C) hepatocytes transfected with LPA siRNAs.

[0297] Next, the 34 selected LPA siRNAs were transfected into HepG2-LPA overexpressing cells and assayed for off-target effects by measuring cellular viability (intracellular ATP content) and toxicity (extracellular adenylate kinase levels) from the same cell culture well (FIG. 4).

[0298] Subsequently, less potent siRNAs with IC₅₀>1 nM or Iₘₐₓ<90% in both pmirGLO-LPA experiments in the stable HepG2 cell clone (see Table 5) were filtered out. In total, 17 LPA siRNAs were selected for additional IC₅₀ experiments in primary transgenic apo(a) mouse hepatocytes. IC₅₀ and Iₘₐₓ values are listed in Table 6.

[0299] Taken together, these results highlight the identification of siRNAs capable of potent and specific inhibition of human and cynomolgus LPA mRNA expression in human cells.

TABLE 6
Activity of selected siRNAs in apo(a) mouse hepatocytes

| Compound | Iₘₐₓ % | IC₅₀ [nM] |
|---|---|---|
| siLPA#0004 | 91.1 | 0.0049 |
| siLPA#0007 | 88.4 | 0.0058 |
| siLPA#0019 | 84.8 | 0.013 |
| siLPA#0090 | 90.8 | 0.0113 |
| siLPA#0104 | 92.1 | 0.0197 |
| siLPA#0107 | 92.9 | 0.003 |
| siLPA#0108 | 93.2 | 0.0076 |
| siLPA#0110 | 95.6 | 0.009 |
| siLPA#0111 | 94.8 | 0.0115 |
| siLPA#0168 | 92.9 | 0.021 |
| siLPA#0169 | 96.2 | 0.0204 |
| siLPA#0172 | 92.9 | 0.0025 |
| siLPA#0200 | 94.5 | 0.003 |
| siLPA#0221 | 91.8 | 0.0139 |
| siLPA#0223 | 91.4 | 0.0041 |
| siLPA#0279 | 95.2 | 0.0393 |
| siLPA#0298 | 93.0 | 0.0343 |

### Example 3: Identification of Active GalNAc-Conjugated siRNAs for Inhibition of Human and Cynomolgus LPA Expression

[0300] Methods

[0301] GalNAc-siRNAs, including non-targeting control siRNAs (NT control), were generated based on the indicated sequences (see sequence listings above) as described in WO 2019/170731.

[0302] Cell and Tissue Culture

[0303] Human (BioreclamationlVT, cat. no. M00995-P) and cynomolgus (Primacyt, cat. no. CHCP-I-T) primary hepatocytes were cultured as described above in Example 2.

[0304] Human peripheral blood mononuclear cells (PBMCs) were isolated from approximately 16 ml of blood from three healthy donors that were collected in Vacutainer® CPT™ tubes coated with sodium heparin (BD, cat. no. 362780) according to manufacturer's instructions.

[0305] Human Apo(a) Transgenic Mouse Model

[0306] The female mice used in the following experiments carried a YAC genomic locus comprising the full-length human LPA gene [Nat Genet. 1995 9(4):424-31]. The transgenic model, strain FVB/N-Tg(LPA,LPAL2,PLG)1Hgc/Mmmh, was in-licensed from University of California, Berkeley, USA.

[0307] Assays

[0308] mRNA expression analysis was performed as described above in Example 2.

[0309] For IC₅₀ measurements in primary human, cynomolgus and transgenic apo(a) mouse hepatocytes under free uptake conditions, 70,000 (human and cynomolgus) or 30,000 (transgenic apo(a) mouse) cells in Collagen-I coated 96-well plates were incubated for 72 hours without medium change with the siRNA-GalNAc conjugates at concentrations ranging from 10 μM-0.01 nM (human and cynomolgus) or 1 μM-0.001 μM (transgenic apo(a) mouse) using 10-fold dilution steps.

[0310] Cytotoxicity and cell viability were measured as described above in Example 2.

[0311] siRNA Stability in Mouse Serum

[0312] Modified siRNAs were tested for nuclease stability in 50% mouse serum. 160 μl of 2.5 μM siRNA in 1×DPBS (Life Technologies, cat. no. 14190-094) and 160 μl mouse serum (Sigma, cat. no. M5905) were incubated at 37° C. for up to 168 h. At each time-point (0 h, 8 h, 24 h, 48 h, 72 h, 96 h and 168 h), 20 μl of the reaction was taken out and quenched with a stop solution (Tissue & Cell Lysis Solution (Epicentre, cat. no. MTC096H), Proteinase K (Sigma, cat. no. P2308), water) at 65° C. for 30 min. Prior to HPLC analysis on a Waters 2695 Separation Module and a 2487 Dual Absorbance Detector, RNase-free water was added to each sample. The solution was analyzed by HPLC using a DNAPac PA200 analytical column (Thermo Scientific, cat. no. 063000).

| Time (min) | Flow (mL/min) | % Buffer A* | % Buffer B** |
|---|---|---|---|
| 0 | 1 | 75 | 25 |
| 20 | 1 | 35 | 65 |

[0313] Buffer A: 20 mM sodium phosphate (Sigma, Cat. No. 342483), pH 11;
[0314] Buffer B: 20 mM sodium phosphate (Sigma, Cat. No. 342483), 1 M sodium bromide (Sigma, Cat. No. 02119), pH 11.

[0315] Serum half-lives were estimated for both strands of the siRNA.

[0316] apo(a) ELISA Assay

[0317] 100 μl of 1:4 pre-diluted supernatants from primary transgenic apo(a) mouse hepatocytes treated with the indicated concentrations of LPA GalNAc-siRNA conjugates were used for apo(a) protein determination by CellBiolabs ELISA kit (cat. no. STA-359) according to the supplier's manual. OD450 measurements were done with a TECAN Infinite M1000 Pro instrument and TECAN's Magellan software module. Percentage of apo(a) protein expression was calculated by normalization based on the mean levels of the LV2 non-silencing siRNA control sequence.

[0318] For apo(a) determination from transgenic apo(a) mouse serum samples, blood was drawn as follows: for generation of maximum 30 μl serum, blood was taken from the vena saphena using Minivette® and microvettes from Sarstedt (cat. no. 17.2111.050 and 20.1280). For generation of maximum 100 μl serum, retroorbital blood was taken using a micropipette (Sigma, cat. no. BR709109) and a microvette (Sarstedt, cat. no. 20.1291). Prior to centrifugation at 4° C. for 10 minutes at 3500×g, the coagulation of the samples was done for 30 minutes at room temperature. Serum samples were diluted 1:5,000-1:20,000 for apo(a) ELISA measurement.

[0319] PLG ELISA Assay

[0320] 100 μl of 1:4 pre-diluted supernatants from primary human hepatocytes treated with the indicated concentrations of LPA GalNAc-siRNA conjugates were used for plasminogen protein determination by Abnova ELISA kit (cat. no. KA3897) according to the supplier's manual. OD450 measurements were done with a TECAN Infinite M1000 Pro instrument and TECAN's Magellan software module. Percentage of PLG protein expression was calculated by normalization based on the mean levels of the LV2 non-silencing siRNA control sequence.

[0321] IFNα Determination

[0322] Protein concentration of human IFNα2a and 7 other cytokines was quantified in the supernatant of human PBMCs by using 25 μl of the cell culture supernatant and applying MesoScale Discovery's electrochemiluminescence U-PLEX assay technology (cat. no. K151VHK) according to the supplier's protocol.

[0323] RNA-Seq Off-Target Analysis

[0324] In order to test for potential off-target activities of LPA GalNAc-siRNA conjugates, RNA-Seq analysis was undertaken by using primary human hepatocytes. For this purpose, 400,000 primary human hepatocytes from two different donors with N=2 technical replicates each were seeded per well of Collagen-I coated 24-well plates (Corning, cat. no. 354408). Incubation with 5 μM of LPA GalNAc-siRNA conjugate without medium change was done for 72 hours. Cell lysis was undertaken with 350 μl RLT buffer (Qiagen, cat. no. 79216) per well and one freeze-thaw cycle at −80° C. Isolation of total RNA including small RNAs<200 nucleotides was done using a miRNeasy Mini kit (Qiagen, cat. no. 217004) including an optional on-column DNase digestion step (Qiagen, cat. no. 79254) according to the manufacturer's protocol. Integrity of the RNA samples was examined by applying Agilent's 2100 Bioanalyzer Total RNA Nano assay (cat. no. 5067-1511). RNA samples with RIN values>8 were included for RNA-Seq profiling. 400 ng of the RNA samples were then converted into RNA-Seq libraries using the TruSeq Stranded Total RNA LT Sample Prep Kit (with Ribo-Zero Gold) from Illumina (cat. no. RS-122-2301 and RS-122-2302). The resulting libraries were sequenced by paired-end sequencing (2×75 bp) on a NextSeq 500 instrument at ˜45 million reads per library using the NextSeq® 500/550 High Output v2 Kit (cat. no. FC-404-2002).

[0325] RNA-Seq data analysis pipeline is based on Array Studio (Qiagen). Briefly, raw data QC was performed, then a filtering step was applied to remove reads corresponding to rRNAs as well as reads having low quality score. Mapping and quantification were performed using OSA4 (Hu et al., Bioinformatics (2012) 28(14):1933-4) (Omicsoft Sequence Aligner, version 4). Reference Human Genome B38 was used for mapping and genes or transcripts were quantified based on Ensembl gene model. Differentially expressed transcripts were identified with DESeq2 (http://www.bioconductor.org/packages/3.2/bioc/html/DESeq2.html) and Voom (Law et al., Genome Biology (2014) 15:R29]. The variable multiplicity was taken into account and false discovery rate (FDR) adjusted p-values were calculated with the Benjamini-Hochberg (BH) correction (Benjamini & Hochberg, J Roy Statist Soc. (1995) B57:289-300).

[0326] Results

[0327] Following identification of potent LPA siRNAs as described in Example 2, the inventors went on to demonstrate whether the selected molecules retain their activity in the context of a GalNAc-conjugate suitable for liver-specific siRNA delivery in vivo. The inventors also assessed whether this activity holds up in additional hepatocytes from M. fascicularis (cynomolgus monkey), a pre-clinical species. For this purpose, the 17 selected LPA siRNAs were conjugated to three consecutive modified GalNAc conjugated nucleotides at the 5′ end of respective siRNA sense strands as shown in Table 3.

[0328] The results of the IC₅₀ measurements by free uptake experiments in primary human and transgenic apo(a) mouse hepatocytes (Table 7) demonstrate the identification of potent LPA GalNAc-siRNAs in both cell types in the absence of transfection conditions.

[0329] Interestingly, the same IC₅₀ experiment described above but using primary cynomolgus hepatocytes (Table 7) shows that the presence of a mismatch of an LPA GalNAc-siRNA to the cynomolgus LPA mRNA sequence has mixed impact on retained siRNA knockdown activity. The activity of human LPA GalNAc-siRNAs with a mismatch to cynomolgus species could therefore not be predicted per se, but is dependent on the sequence context and needs to be tested experimentally.

TABLE 7
Iₘₐₓ and IC₅₀ of selected LPA GalNAc-siRNAs in primary hepatocytes

| | human | | transgenic apo(a) mouse | | cynomolgus | |
|---|---|---|---|---|---|---|
| Compound | Iₘₐₓ % | IC₅₀ [nM] | Iₘₐₓ % | IC₅₀ [nM] | Iₘₐₓ % | IC₅₀ [nM] |
| siLPA #0300 | 76.3 | 6.0 | 88.4 | 0.27 | 66.7 | 3.1 |
| siLPA #0301 | 55.0 | 306.0 | 90.7 | 0.266 | 64.5 | 5.9 |
| siLPA #0302 | 55.9 | 41.2 | 94.6 | 0.242 | 54.7 | 1.2 |
| siLPA #0303 | 63.7 | 2.0 | 92.2 | 0.0117 | 84.1 | 3.8 |
| siLPA #0304 | 53.6 | 11.7 | 90.0 | 0.0369 | 81.4 | 2.4 |
| siLPA #0305 | 77.7 | 2.5 | 91.1 | 0.107 | 96.2 | 2.6 |
| siLPA #0306 | 77.0 | 4.4 | 90.7 | 0.0911 | 87.8 | 8.8 |
| siLPA #0307 | 79.2 | 4.7 | 90.9 | 0.173 | 84.5 | 15.1 |
| siLPA #0308 | 44.7 | 104.0 | 89.1 | 0.95 | 53.4 | 69.4 |
| siLPA #0309 | 61.3 | 52.4 | 91.1 | 0.6 | 90.3 | 914.0 |
| siLPA #0310 | 50.9 | 210.0 | 93.2 | 0.158 | 74.2 | 21.8 |
| siLPA #0311 | 52.3 | 0.3 | 90.6 | 0.96 | 86.0 | 13.3 |
| siLPA #0312 | 63.0 | 0.8 | 94.8 | 0.577 | 69.7 | 33.2 |
| siLPA #0313 | 73.8 | n.d. | 91.8 | 0.293 | 87.3 | 89.7 |
| siLPA #0314 | 50.7 | 4.4 | 89.8 | 0.101 | 83.7 | 5.3 |
| siLPA #0315 | 82.6 | 68.6 | 92.3 | 0.0877 | 21.3 | 232.0 |
| siLPA #0316 | 65.5 | n.d. | 88.9 | 0.308 | 1.5 | n.a. |

[0330] The specificity of the 17 selected LPA GalNAc-siRNAs was evaluated by IC₅₀-based testing of their ability to repress mRNA expression levels of human plasminogen in primary human hepatocytes under free uptake conditions. As shown in Table 8, some sequences with a clear effect on plasminogen mRNA reduction were identified. In order to confirm an effect on the protein level, cell culture supernatants of three siRNA concentrations from the same human hepatocyte experiment were used for a plasminogen ELISA readout (FIG. 5).

TABLE 8
Iₘₐₓ and IC₅₀ of selected GalNAc-siRNAs for PLG
mRNA expression in primary human hepatocytes

| Compound | Iₘₐₓ % | IC₅₀ [nM] |
|---|---|---|
| siLPA#0300 | −0.5 | n.a. |
| siLPA#0301 | 20.7 | >10000 |
| siLPA#0302 | 38.7 | 157.0 |
| siLPA#0303 | 23.3 | >10000 |
| siLPA#0304 | 4.8 | 110.0 |
| siLPA#0305 | 59.7 | 1060.0 |
| siLPA#0306 | −4.3 | n.a. |
| siLPA#0307 | −51.5 | n.a. |
| siLPA#0308 | −7.9 | n.a. |
| siLPA#0309 | 23.8 | >10000 |
| siLPA#0310 | 12.9 | n.a. |
| siLPA#0311 | 13.5 | n.a. |
| siLPA#0312 | −3.1 | n.a. |
| siLPA#0313 | 17.5 | n.a. |
| siLPA#0314 | 13.3 | n.a. |
| siLPA#0315 | 7.6 | n.a. |
| siLPA#0316 | 38.1 | >10000 |

n.a. = not active

[0331] Next, a cytotoxicity assay was performed in HepG2-LPA overexpressing cells to exclude potentially toxic LPA GalNAc-siRNAs (FIG. 6).

[0332] The innate immune response to the 17 selected LPA GalNAc-siRNAs was measured in vitro in human cells by examining the production of interferon α2a secreted from human primary PMBCs isolated from three different healthy donors in response to transfection of the siRNAs. No signs of immune stimulation in human PBMCs were observed for any of the tested LPA GalNAc-siRNAs (FIG. 7).

[0333] The LPA GalNAc-siRNAs were also tested for their in vitro nuclease stability in 50% murine serum by determining their relative stability and half-lives (Table 9). Half-lives ranged between ˜24 and ˜96 hours.

TABLE 9
Nuclease stability of selected GalNAc-
siRNAs in 50% mouse serum

| Compound | t_{1/2} | |
|---|---|---|
| siLPA#0300 | >24 | h |
| siLPA#0301 | >48 | h |
| siLPA#0302 | >24 | h |
| siLPA#0303 | >48 | h |
| siLPA#0304 | >48 | h |
| siLPA#0305 | 96 | h |
| siLPA#0306 | >48 | h |
| siLPA#0307 | >48 | h |
| siLPA#0308 | >48 | h |
| siLPA#0309 | >96 | h |
| siLPA#0310 | >48 | h |
| siLPA#0311 | >72 | h |
| siLPA#0312 | >24 | h |
| siLPA#0313 | >24 | h |
| siLPA#0314 | 72 | h |
| siLPA#0315 | >96 | h |
| siLPA#0316 | >48 | h |

[0334] Finally, the 17 selected LPA GalNAc-siRNAs were tested in vivo in a transgenic mouse model secreting human apo(a) protein from murine liver tissue (FIG. 8). After subcutaneous administration of the selected compounds at a single 5 mg/kg dose, target protein levels were reduced between 68% and 96% (KD max) compared to animals treated with PBS vehicle control. Depending on the compound, the levels returned to 50% of the maximum knockdown (KD₅₀) between ˜day 7 and ˜day 25 post treatment.

[0335] Three LPA GalNAc-siRNAs were selected that comprise a strong in vitro and in vivo on-target activity, retained cross-species activity in cynomolgus hepatocytes, and no off-target activity on plasminogen in human hepatocytes. The overall specificity of siLPA #0307, siLPA #0311 and siLPA #0314 was tested by RNA-Seq whole transcriptome analysis using primary human hepatocytes from two different donors treated with 5 μM LPA GalNAc-siRNAs for 72 hours. As shown in FIG. 9, the specificity of the three selected LPA GalNAc-siRNAs was confirmed, LPA being the most downregulated transcript in all of the three analyses.

[0336] In summary, the inventors have demonstrated the successful identification of potent, specific, and non-immunogenic LPA GalNAc-siRNAs that strongly reduce expression of the human LPA mRNA and translated apo(a) protein in relevant in vitro and in vivo models.

### Example 4: Lead Optimization of GalNAc-Conjugated LPA siRNA Sequences

[0337] Based on the results from Example 3, the three parent sequences of the selected LPA GalNAc-siRNAs (siLPA #0307, siLPA #0311, and siLPA #0314) were used for an optimization campaign that included 66 different chemical modifications per siRNA sequence. The resulting sequences and modification pattern are shown in Table 4. All experiments were done as described in Examples 2 and 3 above.

[0338] The in vitro activity of these optimization libraries was tested in freshly isolated primary hepatocytes from female apo(a) transgenic mice under free uptake conditions using 0.2 nM, 1 nM, and 5 nM concentrations of LPA GalNAc-siRNAs. As depicted in FIG. 10, the optimization libraries based on selected sequences siLPA #0307 and siLPA #0311 were identified to exhibit a higher overall in vitro activity as compared to lead sequence siLPA #0314.

[0339] In order to evaluate improved stability features of the optimized LPA GalNAc-siRNAs, the optimization libraries were assayed for their in vitro half-lives in 50% mouse serum. As demonstrated in Table 10, a large number of modifications were identified with improved nuclease stability as compared to the respective parent molecules.

TABLE 10

| siLPA ID | t_{1/2} | siLPA ID | t_{1/2} | siLPA ID | t_{1/2} | |
|---|---|---|---|---|---|---|
| siLPA#0307 | >48 h | siLPA#0311 | >72 h | siLPA#0314 | 72 | h |
| (parent) | | (parent) | | (parent) | | |
| siLPA#0317 | >72 h | siLPA#0383 | >72 h | siLPA#0449 | 168 | h |
| siLPA#0318 | >72 h | siLPA#0384 | >72 h | siLPA#0450 | 168 | h |
| siLPA#0319 | >72 h | siLPA#0385 | >72 h | siLPA#0451 | >96 | h |
| siLPA#0320 | >72 h | siLPA#0386 | >72 h | siLPA#0452 | 168 | h |
| siLPA#0321 | >72 h | siLPA#0387 | >96 h | siLPA#0453 | >96 | h |
| siLPA#0322 | >72 h | siLPA#0388 | >96 h | siLPA#0454 | 168 | h |
| siLPA#0323 | >72 h | siLPA#0389 | >96 h | siLPA#0455 | >96 | h |
| siLPA#0324 | >72 h | siLPA#0390 | >96 h | siLPA#0456 | >96 | h |
| siLPA#0325 | >72 h | siLPA#0391 | >96 h | siLPA#0457 | >96 | h |
| siLPA#0326 | >72 h | siLPA#0392 | >96 h | siLPA#0458 | >96 | h |
| siLPA#0327 | >72 h | siLPA#0393 | >96 h | siLPA#0459 | 168 | h |
| siLPA#0328 | >72 h | siLPA#0394 | >96 h | siLPA#0460 | 168 | h |
| siLPA#0329 | >72 h | siLPA#0395 | >96 h | siLPA#0461 | >96 | h |
| siLPA#0330 | >72 h | siLPA#0396 | >96 h | siLPA#0462 | 168 | h |
| siLPA#0331 | >72 h | siLPA#0397 | >96 h | siLPA#0463 | 168 | h |
| siLPA#0332 | >72 h | siLPA#0398 | >96 h | siLPA#0464 | 168 | h |
| siLPA#0333 | >72 h | siLPA#0399 | >96 h | siLPA#0465 | 168 | h |
| siLPA#0334 | >72 h | siLPA#0400 | >96 h | siLPA#0466 | >96 | h |
| siLPA#0335 | >72 h | siLPA#0401 | >96 h | siLPA#0467 | >96 | h |
| siLPA#0336 | >72 h | siLPA#0402 | >72 h | siLPA#0468 | 168 | h |
| siLPA#0337 | >72 h | siLPA#0403 | >72 h | siLPA#0469 | 168 | h |
| siLPA#0338 | >72 h | siLPA#0404 | >72 h | siLPA#0470 | 168 | h |
| siLPA#0339 | >72 h | siLPA#0405 | >72 h | siLPA#0471 | 168 | h |
| siLPA#0340 | >72 h | siLPA#0406 | >72 h | siLPA#0472 | 168 | h |
| siLPA#0341 | >72 h | siLPA#0407 | >96 h | siLPA#0473 | 168 | h |
| siLPA#0342 | >72 h | siLPA#0408 | >96 h | siLPA#0474 | >96 | h |
| siLPA#0343 | >72 h | siLPA#0409 | >96 h | siLPA#0475 | 168 | h |
| siLPA#0344 | >72 h | siLPA#0410 | >96 h | siLPA#0476 | 168 | h |
| siLPA#0345 | >72 h | siLPA#0411 | >72 h | siLPA#0477 | >96 | h |
| siLPA#0346 | >72 h | siLPA#0412 | >72 h | siLPA#0478 | >96 | h |
| siLPA#0347 | >72 h | siLPA#0413 | >96 h | siLPA#0479 | >96 | h |
| siLPA#0348 | >48 h | siLPA#0414 | >96 h | siLPA#0480 | >96 | h |
| siLPA#0349 | >72 h | siLPA#0415 | >96 h | siLPA#0481 | 168 | h |
| siLPA#0350 | >72 h | siLPA#0416 | >96 h | siLPA#0482 | 168 | h |
| siLPA#0351 | >72 h | siLPA#0417 | >96 h | siLPA#0483 | 168 | h |
| siLPA#0352 | >72 h | siLPA#0418 | >96 h | siLPA#0484 | 168 | h |
| siLPA#0353 | >72 h | siLPA#0419 | >96 h | siLPA#0485 | 168 | h |
| siLPA#0354 | >72 h | siLPA#0420 | >96 h | siLPA#0486 | 168 | h |
| siLPA#0355 | >72 h | siLPA#0421 | >96 h | siLPA#0487 | >72 | h |
| siLPA#0356 | >72 h | siLPA#0422 | >96 h | siLPA#0488 | >72 | h |
| siLPA#0357 | >72 h | siLPA#0423 | >96 h | siLPA#0489 | >72 | h |
| siLPA#0358 | >72 h | siLPA#0424 | >96 h | siLPA#0490 | >72 | h |
| siLPA#0359 | >72 h | siLPA#0425 | >96 h | siLPA#0491 | >72 | h |
| siLPA#0360 | >72 h | siLPA#0426 | >72 h | siLPA#0492 | >72 | h |
| siLPA#0361 | >72 h | siLPA#0427 | >72 h | siLPA#0493 | >72 | h |
| siLPA#0362 | >72 h | siLPA#0428 | >72 h | siLPA#0494 | >72 | h |
| siLPA#0363 | >72 h | siLPA#0429 | >72 h | siLPA#0495 | >72 | h |
| siLPA#0364 | >72 h | siLPA#0430 | >72 h | siLPA#0496 | 168 | h |
| siLPA#0365 | >72 h | siLPA#0431 | >72 h | siLPA#0497 | 168 | h |
| siLPA#0366 | >72 h | siLPA#0432 | >72 h | siLPA#0498 | 168 | h |
| siLPA#0367 | >72 h | siLPA#0433 | >72 h | siLPA#0499 | 168 | h |
| siLPA#0368 | >72 h | siLPA#0434 | >72 h | siLPA#0500 | 168 | h |
| siLPA#0369 | >72 h | siLPA#0435 | >72 h | siLPA#0501 | >72 | h |
| siLPA#0370 | >72 h | siLPA#0436 | >48 h | siLPA#0502 | >72 | h |
| siLPA#0371 | >72 h | siLPA#0437 | >48 h | siLPA#0503 | >72 | h |
| siLPA#0372 | >72 h | siLPA#0438 | >48 h | siLPA#0504 | >72 | h |
| siLPA#0373 | >72 h | siLPA#0439 | >72 h | siLPA#0505 | >96 | h |
| siLPA#0374 | >72 h | siLPA#0440 | >72 h | siLPA#0506 | >96 | h |
| siLPA#0375 | >72 h | siLPA#0441 | >72 h | siLPA#0507 | >96 | h |
| siLPA#0376 | >72 h | siLPA#0442 | >72 h | siLPA#0508 | >96 | h |
| siLPA#0377 | >72 h | siLPA#0443 | >96 h | siLPA#0509 | >96 | h |
| siLPA#0378 | >72 h | siLPA#0444 | >72 h | siLPA#0510 | 168 | h |
| siLPA#0379 | >72 h | siLPA#0445 | >72 h | siLPA#0511 | 168 | h |
| siLPA#0380 | >72 h | siLPA#0446 | >72 h | siLPA#0512 | 168 | h |
| siLPA#0381 | >72 h | siLPA#0447 | >72 h | siLPA#0513 | 168 | h |
| siLPA#0382 | >72 h | siLPA#0448 | >96 h | siLPA#0514 | 168 | h |

[0340] Next, in total 41 out of 198 optimized LPA GalNAc-siRNAs based on the three different parent sequences were selected for in vivo pharmacology testing in apo(a) transgenic mice and compared to the respective parent molecules siLPA #0307, siLPA #0311 and siLPA #0314 (FIGS. 11A-C). After subcutaneous administration of the selected compounds at a single 3 mg/kg dose, target protein levels were reduced between 56% and 99% (KDₘₐₓ) compared to animals treated with PBS vehicle control. Depending on the compound, the levels returned to 50% of the maximum knockdown (KD₅₀) between ˜day 8 and ˜day 42 post treatment. A large number of optimized molecules were identified with an improved in vivo pharmacology profile (KDₘₐₓ and KD₅₀) when compared to the respective parent sequences.

[0341] Towards the selection of advanced, optimized LPA GalNAc-siRNAs, further in vitro experiments were undertaken. The immune stimulatory potential was measured in the human PBMC assay using IFNα2a secretion to the supernatant as readout (FIG. 12). No signs of immune stimulation in human PBMCs were observed for any of the tested LPA GalNAc-siRNAs.

[0342] The cross-species activity of the 41 selected, optimized LPA GalNAc-siRNAs was evaluated in primary cynomolgus hepatocytes (FIG. 13). Interestingly, although all tested sequence modifications share one mismatch to macaque/the cynomolgus mRNA, the retained knockdown potencies differ largely among compounds.

[0343] In order to test for relative specificity of the 41 selected, optimized LPA GalNAc-siRNAs, their effect on mRNA expression levels of human plasminogen using primary human hepatocytes under free uptake conditions was measured (FIG. 14). Only a few molecules were identified with a minor effect on PLG expression levels.

[0344] Finally, some advanced, optimized LPA GalNAc-siRNAs (siLPA #0317, siLPA #0393, siLPA #0394, siLPA #0411, siLPA #0414, and siLPA #0455) were assayed in IC₅₀ experiments under free uptake conditions using primary transgenic apo(a) mouse hepatocytes (Table 11).

TABLE 11
Activity of selected GalNAc-siRNAs in apo(a) mouse hepatocytes

| Compound | Iₘₐₓ % | IC₅₀ [nM] |
|---|---|---|
| siLPA#0317 | 94.7 | 0.0471 |
| siLPA#0393 | 93.9 | 0.0683 |
| siLPA#0394 | 96.2 | 0.0616 |
| siLPA#0411 | 86.7 | 0.128 |
| siLPA#0414 | 87.9 | 0.396 |
| siLPA#0455 | 85.5 | 0.367 |

[0345] Taken together, the inventors have presented data that demonstrate the successful identification of optimized LPA GalNAc-siRNAs that exhibit significantly improved in vitro and in vivo pharmacology profiles.

LPA Sequences

Human LPA mRNA sequence-NM_00577.2. (SEQ ID NO. 1632)

| | |
|---|---|
| 1 | aggtaccttt ggggctggct ttctcaagga agcccagctc cctgtgattg agaatgaagt |
| 61 | gtgcaatcgc tatgactggg attgggacac actttctggg cactgctggc cagtcccaaa |
| 121 | atggaacata aggaagtggt tcttctactt cttttatttc tgaaatcagc agcacctgag |
| 181 | caaagccatg tggtccagga ttgctaccat ggtgatggac agagttatcg aggcacgtac |
| 241 | tccaccactg tcacaggaag gacctgccaa gcttggtcat ctatgacacc acatcaacat |
| 301 | aataggacca cagaaaacta cccaaatgct ggcttgatca tgaactactg caggaatcca |
| 361 | gatgctgtgg cagctcctta ttgttatacg agggatcccg gtgtcaggtg ggagtactgc |
| 421 | aacctgacgc aatgctcaga cgcagaaggg actgccgtcg cgcctccgac tgttaccccg |
| 481 | gttccaagcc tagaggctcc ttccgaacaa gcaccgactg agcaaaggcc tggggtgcag |
| 541 | gagtgctacc atggtaatgg acagagttat cgaggcacat actccaccac tgtcacagga |
| 601 | agaacctgcc aagcttggtc atctatgaca ccacactcgc atagtcggac cccagaatac |
| 661 | tacccaaatg ctggcttgat catgaactac tgcaggaatc cagatgctgt ggcagctcct |
| 721 | tattgttata cgagggatcc cggtgtcagg tgggagtact gcaacctgac gcaatgctca |
| 781 | gacgcagaag ggactgccgt cgcgcctccg actgttaccc cggttccaag cctagaggct |
| 841 | ccttccgaac aagcaccgac tgagcaaagg cctggggtgc aggagtgcta ccatggtaat |
| 901 | ggacagagtt atcgaggcac atactccacc actgtcacag gaagaacctg ccaagcttgg |
| 961 | tcatctatga caccacactc gcatagtcgg accccagaat actacccaaa tgctggcttg |
| 1021 | atcatgaact actgcaggaa tccagatgct gtggcagctc cttattgtta tacgagggat |
| 1081 | cccggtgtca ggtgggagta ctgcaacctg acgcaatgct cagacgcaga agggactgcc |
| 1141 | gtcgcgcctc cgactgttac cccggttcca agcctagagg ctccttccga acaagcaccg |
| 1201 | actgagcaga ggcctggggt gcaggagtgc taccacggta atggacagag ttatcgaggc |
| 1261 | acatactcca ccactgtcac tggaagaacc tgccaagctt ggtcatctat gacaccacac |
| 1321 | tcgcatagtc ggaccccaga atactaccca aatgctggct tgatcatgaa ctactgcagg |
| 1381 | aatccagatg ctgtggcagc tccttattgt tatacgaggg atcccggtgt caggtgggag |
| 1441 | tactgcaacc tgacgcaatg ctcagacgca gaagggactg ccgtcgcgcc tccgactgtt |
| 1501 | accccggttc caagcctaga ggctccttcc gaacaagcac cgactgagca aaggcctggg |
| 1561 | gtgcaggagt gctaccatgg taatggacag agttatcgag gcacatactc caccactgtc |
| 1621 | acaggaagaa cctgccaagc ttggtcatct atgacaccac actcgcatag tcggacccca |
| 1681 | gaatactacc caaatgctgg cttgatcatg aactactgca ggaatccaga tgctgtggca |
| 1741 | gctccttatt gttatacgag ggatcccggt gtcaggtggg agtactgcaa cctgacgcaa |
| 1801 | tgctcagacg cagaagggac tgccgtcgcg cctccgactg ttaccccggt tccaagccta |
| 1861 | gaggctcctt ccgaacaagc accgactgag caaaggcctg gggtgcagga gtgctaccat |
| 1921 | ggtaatggac agagttatcg aggcacatac tccaccactg tcacaggaag aacctgccaa |
| 1981 | gcttggtcat ctatgacacc acactcgcat agtcggaccc cagaatacta cccaaatgct |
| 2041 | ggcttgatca tgaactactg caggaatcca gatgctgtgg cagctcctta ttgttatacg |
| 2101 | agggatcccg gtgtcaggtg ggagtactgc aacctgacgc aatgctcaga cgcagaaggg |
| 2161 | actgccgtcg cgcctccgac tgttaccccg gttccaagcc tagaggctcc ttccgaacaa |
| 2221 | gcaccgactg agcaaaggcc tggggtgcag gagtgctacc atggtaatgg acagagttat |
| 2281 | cgaggcacat actccaccac tgtcacagga agaacctgcc aagcttggtc atctatgaca |
| 2341 | ccacactcgc atagtcggac cccagaatac tacccaaatg ctggcttgat catgaactac |
| 2401 | tgcaggaatc cagatgctgt ggcagctcct tattgttata cgagggatcc cggtgtcagg |
| 2461 | tgggagtact gcaacctgac gcaatgctca gacgcagaag ggactgccgt cgcgcctccg |
| 2521 | actgttaccc cggttccaag cctagaggct ccttccgaac aagcaccgac tgagcagagg |
| 2581 | cctggggtgc aggagtgcta ccacggtaat ggacagagtt atcgaggcac atactccacc |
| 2641 | actgtcactg gaagaacctg ccaagcttgg tcatctatga caccacactc gcatagtcgg |
| 2701 | accccagaat actacccaaa tgctggcttg atcatgaact actgcaggaa tccagatcct |
| 2761 | gtggcagccc cttattgtta tacgagggat cccagtgtca ggtgggagta ctgcaacctg |
| 2821 | acacaatgct cagacgcaga agggactgcc gtcgcgcctc caactattac cccgattcca |
| 2881 | agcctagagg ctccttctga acaagcacca actgagcaaa ggcctggggt gcaggagtgc |
| 2941 | taccacggaa atggacagag ttatcaaggc acatacttca ttactgtcac aggaagaacc |
| 3001 | tgccaagctt ggtcatctat gacaccacac tcgcatagtc ggaccccagc atactaccca |
| 3061 | aatgctggct tgatcaagaa ctactgccga aatccagatc ctgtggcagc cccttggtgt |
| 3121 | tatacaacag atcccagtgt caggtgggag tactgcaacc tgacacgatg ctcagatgca |
| 3181 | gaatggactg ccttcgtccc tccgaatgtt attctggctc caagcctaga ggcttttttt |
| 3241 | gaacaagcac tgactgagga aacccccggg gtacaggact gctactacca ttatggacag |
| 3301 | agttaccgag gcacatactc caccactgtc acaggaagaa cttgccaagc ttggtcatct |
| 3361 | atgacaccac accagcatag tcggacccca gaaaactacc caaatgctgg cctgaccagg |
| 3421 | aactactgca ggaatccaga tgctgagatt cgcccttggt gttacaccat ggatcccagt |
| 3481 | gtcaggtggg agtactgcaa cctgacacaa tgcctggtga cagaatcaag tgtccttgca |
| 3541 | actctcacgg tggtcccaga tccaagcaca gaggcttctt ctgaagaagc accaacggag |
| 3601 | caaagccccg gggtccagga ttgctaccat ggtgatggac agagttatcg aggctcattc |
| 3661 | tctaccactg tcacaggaag gacatgtcag tcttggtcct ctatgacacc acactggcat |
| 3721 | cagaggacaa cagaatatta tccaaatggt ggcctgacca ggaactactg caggaatcca |
| 3781 | gatgctgaga ttagtccttg gtgttatacc atggatccca atgtcagatg ggagtactgc |
| 3841 | aacctgacac aatgtccagt gacagaatca agtgtccttg cgacgtccac ggctgtttct |
| 3901 | gaacaagcac caacggagca aagccccaca gtccaggact gctaccatgg tgatggacag |
| 3961 | agttatcgag gctcattctc caccactgtt acaggaagga catgtcagtc ttggtcctct |
| 4021 | atgacaccac actggcatca gagaaccaca gaatactacc caaatggtgg cctgaccagg |
| 4081 | aactactgca ggaatccaga tgctgagatt cgcccttggt gttataccat ggatcccagt |
| 4141 | gtcagatggg agtactgcaa cctgacgcaa tgtccagtga tggaatcaac tctcctcaca |
| 4201 | actcccacgg tggtcccagt tccaagcaca gagcttcctt ctgaagaagc accaactgaa |
| 4261 | aacagcactg gggtccagga ctgctaccga ggtgatggac agagttatcg aggcacactc |
| 4321 | tccaccacta tcacaggaag aacatgtcag tcttggtcgt ctatgacacc acattggcat |
| 4381 | cggaggatcc cattatacta tccaaatgct ggcctgacca ggaactactg caggaatcca |
| 4441 | gatgctgaga ttcgcccttg gtgttacacc atggatccca gtgtcaggtg ggagtactgc |
| 4501 | aacctgacac gatgtccagt gacagaatcg agtgtcctca caactcccac agtggccccg |
| 4561 | gttccaagca cagaggctcc ttctgaacaa gcaccacctg agaaaagccc tgtggtccag |
| 4621 | gattgctacc atggtgatgg acggagttat cgaggcatat cctccaccac tgtcacagga |
| 4681 | aggacctgtc aatcttggtc atctatgata ccacactggc atcagaggac cccagaaaac |
| 4741 | tacccaaatg ctggcctgac cgagaactac tgcaggaatc cagattctgg gaaacaaccc |
| 4801 | tggtgttaca caaccgatcc gtgtgtgagg tgggagtact gcaatctgac acaatgctca |
| 4861 | gaaacagaat caggtgtcct agagactccc actgttgttc cagttccaag catggaggct |
| 4921 | cattctgaag cagcaccaac tgagcaaacc cctgtggtcc ggcagtgcta ccatggtaat |
| 4981 | ggccagagtt atcgaggcac attctccacc actgtcacag gaaggacatg tcaatcttgg |
| 5041 | tcatccatga caccacaccg gcatcagagg accccagaaa actacccaaa tgatggcctg |
| 5101 | acaatgaact actgcaggaa tccagatgcc gatacaggcc cttggtgttt taccatggac |
| 5161 | cccagcatca ggtgggagta ctgcaacctg acgcgatgct cagacacaga agggactgtg |
| 5221 | gtcgctcctc cgactgtcat ccaggttcca agcctagggc ctccttctga acaagactgt |
| 5281 | atgtttggga atgggaaagg ataccggggc aagaaggcaa ccactgttac tgggacgcca |
| 5341 | tgccaggaat gggctgccca ggagccccat agacacagca cgttcattcc agggacaaat |
| 5401 | aaatgggcag gtctggaaaa aaattactgc cgtaaccctg atggtgacat caatggtccc |
| 5461 | tggtgctaca caatgaatcc aagaaaactt tttgactact gtgatatccc tctctgtgca |
| 5521 | tcctcttcat ttgattgtgg gaagcctcaa gtggagccga agaaatgtcc tggaagcatt |
| 5581 | gtaggggggt gtgtggccca cccacattcc tggccctggc aagtcagtct cagaacaagg |
| 5641 | tttggaaagc acttctgtgg aggcacctta atatccccag agtgggtgct gactgctgct |
| 5701 | cactgcttga agaagtcctc aaggccttca tcctacaagg tcatcctggg tgcacaccaa |
| 5761 | gaagtgaacc tcgaatctca tgttcaggaa atagaagtgt ctaggctgtt cttggagccc |
| 5821 | acacaagcag atattgcctt gctaaagcta agcaggcctg ccgtcatcac tgacaaagta |
| 5881 | atgccagctt gtctgccatc cccagactac atggtcaccg ccaggactga atgttacatc |
| 5941 | actggctggg gagaaaccca aggtaccttt gggactggcc ttctcaagga agcccagctc |
| 6001 | cttgttattg agaatgaagt gtgcaatcac tataagtata tttgtgctga gcatttggcc |
| 6061 | agaggcactg acagttgcca gggtgacagt ggagggcctc tggtttgctt cgagaaggac |
| 6121 | aaatacattt tacaaggagt cacttcttgg ggtcttggct gtgcacgccc caataagcct |
| 6181 | ggtgtctatg ctcgtgtttc aaggtttgtt acttggattg agggaatgat gagaaataat |
| 6241 | taattggacg ggagacagag tgaagcatca acctacttag aagctgaaac gtgggtaagg |
| 6301 | atttagcatg ctggaaataa tagacagcaa tcaaacgaag acactgttcc cagctaccag |
| 6361 | ctatgccaaa ccttggcatt tttggtattt ttgtgtataa gcttttaagg tctgactgac |
| 6421 | aaattctgta ttaaggtgtc atagctatga catttgttaa aaataaactc tgcacttatt |
| 6481 | ttgatttga |

human LPA mRNA sequence-NM_005577.3 (SEQ ID NO: 1627)

| | |
|---|---|
| 1 | ctgggattgg gacacacttt ctgggcactg ctggccagtc ccaaaatgga acataaggaa |
| 61 | gtggttcttc tacttctttt atttctgaaa tcagcagcac ctgagcaaag ccatgtggtc |
| 121 | caggattgct accatggtga tggacagagt tatcgaggca cgtactccac cactgtcaca |
| 181 | ggaaggacct gccaagcttg gtcatctatg acaccacatc aacataatag gaccacagaa |
| 241 | aactacccaa atgctggctt gatcatgaac tactgcagga atccagatgc tgtggcagct |
| 301 | ccttattgtt atacgaggga tcccggtgtc aggtgggagt actgcaacct gacgcaatgc |
| 361 | tcagacgcag aagggactgc cgtcgcgcct ccgactgtta ccccggttcc aagcctagag |
| 421 | gctccttccg aacaagcacc gactgagcaa aggcctgggg tgcaggagtg ctaccatggt |
| 481 | aatggacaga gttatcgagg cacatactcc accactgtca caggaagaac ctgccaagct |
| 541 | tggtcatcta tgacaccaca ctcgcatagt cggaccccag aatactaccc aaatgctggc |
| 601 | ttgatcatga actactgcag gaatccagat gctgtggcag ctccttattg ttatacgagg |
| 661 | gatcccggtg tcaggtggga gtactgcaac ctgacgcaat gctcagacgc agaagggact |
| 721 | gccgtcgcgc ctccgactgt taccccggtt ccaagcctag aggctccttc cgaacaagca |
| 781 | ccgactgagc aaaggcctgg ggtgcaggag tgctaccatg gtaatggaca gagttatcga |
| 841 | ggcacatact ccaccactgt cacaggaaga acctgccaag cttggtcatc tatgacacca |
| 901 | cactcgcata gtcggacccc agaatactac ccaaatgctg gcttgatcat gaactactgc |
| 961 | aggaatccag atgctgtggc agctccttat tgttatacga gggatcccgg tgtcaggtgg |
| 1021 | gagtactgca acctgacgca atgctcagac gcagaaggga ctgccgtcgc gcctccgact |
| 1081 | gttaccccgg ttccaagcct agaggctcct tccgaacaag caccgactga gcagaggcct |
| 1141 | ggggtgcagg agtgctacca cggtaatgga cagagttatc gaggcacata ctccaccact |
| 1201 | gtcactggaa gaacctgcca agcttggtca tctatgacac cacactcgca tagtcggacc |
| 1261 | ccagaatact acccaaatgc tggcttgatc atgaactact gcaggaatcc agatgctgtg |
| 1321 | gcagctcctt attgttatac gagggatccc ggtgtcaggt gggagtactg caacctgacg |
| 1381 | caatgctcag acgcagaagg gactgccgtc gcgcctccga ctgttacccc ggttccaagc |
| 1441 | ctagaggctc cttccgaaca agcaccgact gagcaaaggc ctggggtgca ggagtgctac |
| 1501 | catggtaatg gacagagtta tcgaggcaca tactccacca ctgtcacagg aagaacctgc |
| 1561 | caagcttggt catctatgac accacactcg catagtcgga ccccagaata ctacccaaat |
| 1621 | gctggcttga tcatgaacta ctgcaggaat ccagatgctg tggcagctcc ttattgttat |
| 1681 | acgagggatc ccggtgtcag gtgggagtac tgcaacctga cgcaatgctc agacgcagaa |
| 1741 | gggactgccg tcgcgcctcc gactgttacc ccggttccaa gcctagaggc tccttccgaa |
| 1801 | caagcaccga ctgagcaaag gcctggggtg caggagtgct accatggtaa tggacagagt |
| 1861 | tatcgaggca catactccac cactgtcaca ggaagaacct gccaagcttg gtcatctatg |
| 1921 | acaccacact cgcatagtcg gaccccagaa tactacccaa atgctggctt gatcatgaac |
| 1981 | tactgcagga atccagatgc tgtggcagct ccttattgtt atacgaggga tcccggtgtc |
| 2041 | aggtgggagt actgcaacct gacgcaatgc tcagacgcag aagggactgc cgtcgcgcct |
| 2101 | ccgactgtta ccccggttcc aagcctagag gctccttccg aacaagcacc gactgagcaa |
| 2161 | aggcctgggg tgcaggagtg ctaccatggt aatggacaga gttatcgagg cacatactcc |
| 2221 | accactgtca caggaagaac ctgccaagct tggtcatcta tgacaccaca ctcgcatagt |
| 2281 | cggaccccag aatactaccc aaatgctggc ttgatcatga actactgcag gaatccagat |
| 2341 | gctgtggcag ctccttattg ttatacgagg gatcccggtg tcaggtggga gtactgcaac |
| 2401 | ctgacgcaat gctcagacgc agaagggact gccgtcgcgc ctccgactgt taccccggtt |
| 2461 | ccaagcctag aggctccttc cgaacaagca ccgactgagc agaggcctgg ggtgcaggag |
| 2521 | tgctaccacg gtaatggaca gagttatcga ggcacatact ccaccactgt cactggaaga |
| 2581 | acctgccaag cttggtcatc tatgacacca cactcgcata gtcggacccc agaatactac |
| 2641 | ccaaatgctg gcttgatcat gaactactgc aggaatccag atcctgtggc agccccttat |
| 2701 | tgttatacga gggatcccag tgtcaggtgg gagtactgca acctgacaca atgctcagac |
| 2761 | gcagaaggga ctgccgtcgc gcctccaact attaccccga ttccaagcct agaggctcct |
| 2821 | tctgaacaag caccaactga gcaaaggcct ggggtgcagg agtgctacca cggaaatgga |
| 2881 | cagagttatc aaggcacata cttcattact gtcacaggaa gaacctgcca agcttggtca |
| 2941 | tctatgacac cacactcgca tagtcggacc ccagcatact acccaaatgc tggcttgatc |
| 3001 | aagaactact gccgaaatcc agatcctgtg gcagcccctt ggtgttatac aacagatccc |
| 3061 | agtgtcaggt gggagtactg caacctgaca cgatgctcag atgcagaatg gactgccttc |
| 3121 | gtccctccga atgttattct ggctccaagc ctagaggctt tttttgaaca agcactgact |
| 3181 | gaggaaaccc ccggggtaca ggactgctac taccattatg gacagagtta ccgaggcaca |
| 3241 | tactccacca ctgtcacagg aagaacttgc caagcttggt catctatgac accacaccag |
| 3301 | catagtcgga ccccagaaaa ctacccaaat gctggcctga ccaggaacta ctgcaggaat |
| 3361 | ccagatgctg agattcgccc ttggtgttac accatggatc ccagtgtcag gtgggagtac |
| 3421 | tgcaacctga cacaatgcct ggtgacagaa tcaagtgtcc ttgcaactct cacggtggtc |
| 3481 | ccagatccaa gcacagaggc ttcttctgaa gaagcaccaa cggagcaaag ccccggggtc |
| 3541 | caggattgct accatggtga tggacagagt tatcgaggct cattctctac cactgtcaca |
| 3601 | ggaaggacat gtcagtcttg gtcctctatg acaccacact ggcatcagag gacaacagaa |
| 3661 | tattatccaa atggtggcct gaccaggaac tactgcagga atccagatgc tgagattagt |
| 3721 | ccttggtgtt ataccatgga tcccaatgtc agatgggagt actgcaacct gacacaatgt |
| 3781 | ccagtgacag aatcaagtgt ccttgcgacg tccacggctg tttctgaaca agcaccaacg |
| 3841 | gagcaaagcc ccacagtcca ggactgctac catggtgatg gacagagtta tcgaggctca |
| 3901 | ttctccacca ctgttacagg aaggacatgt cagtcttggt cctctatgac accacactgg |
| 3961 | catcagagaa ccacagaata ctacccaaat ggtggcctga ccaggaacta ctgcaggaat |
| 4021 | ccagatgctg agattcgccc ttggtgttat accatggatc ccagtgtcag atgggagtac |
| 4081 | tgcaacctga cgcaatgtcc agtgatggaa tcaactctcc tcacaactcc cacggtggtc |
| 4141 | ccagttccaa gcacagagct tccttctgaa gaagcaccaa ctgaaaacag cactggggtc |
| 4201 | caggactgct accgaggtga tggacagagt tatcgaggca cactctccac cactatcaca |
| 4261 | ggaagaacat gtcagtcttg gtcgtctatg acaccacatt ggcatcggag gatcccatta |
| 4321 | tactatccaa atgctggcct gaccaggaac tactgcagga atccagatgc tgagattcgc |
| 4381 | ccttggtgtt acaccatgga tcccagtgtc aggtgggagt actgcaacct gacacgatgt |
| 4441 | ccagtgacag aatcgagtgt cctcacaact cccacagtgg ccccggttcc aagcacagag |
| 4501 | gctccttctg aacaagcacc acctgagaaa agccctgtgg tccaggattg ctaccatggt |
| 4561 | gatggacgga gttatcgagg catatcctcc accactgtca caggaaggac ctgtcaatct |
| 4621 | tggtcatcta tgataccaca ctggcatcag aggaccccag aaaactaccc aaatgctggc |
| 4681 | ctgaccgaga actactgcag gaatccagat tctgggaaac aaccctggtg ttacacaacc |
| 4741 | gatccgtgtg tgaggtggga gtactgcaat ctgacacaat gctcagaaac agaatcaggt |
| 4801 | gtcctagaga ctcccactgt tgttccagtt ccaagcatgg aggctcattc tgaagcagca |
| 4861 | ccaactgagc aaacccctgt ggtccggcag tgctaccatg gtaatggcca gagttatcga |
| 4921 | ggcacattct ccaccactgt cacaggaagg acatgtcaat cttggtcatc catgacacca |
| 4981 | caccggcatc agaggacccc agaaaactac ccaaatgatg gcctgacaat gaactactgc |
| 5041 | aggaatccag atgccgatac aggcccttgg tgttttacca tggaccccag catcaggtgg |
| 5101 | gagtactgca acctgacgcg atgctcagac acagaaggga ctgtggtcgc tcctccgact |
| 5161 | gtcatccagg ttccaagcct agggcctcct tctgaacaag actgtatgtt tgggaatggg |
| 5221 | aaaggatacc ggggcaagaa ggcaaccact gttactggga cgccatgcca ggaatgggct |
| 5281 | gcccaggagc cccatagaca cagcacgttc attccaggga caaataaatg ggcaggtctg |
| 5341 | gaaaaaaatt actgccgtaa ccctgatggt gacatcaatg gtccctggtg ctacacaatg |
| 5401 | aatccaagaa aactttttga ctactgtgat atccctctct gtgcatcctc ttcatttgat |
| 5461 | tgtgggaagc ctcaagtgga gccgaagaaa tgtcctggaa gcattgtagg ggggtgtgtg |
| 5521 | gcccacccac attcctggcc ctggcaagtc agtctcagaa caaggtttgg aaagcacttc |
| 5581 | tgtggaggca ccttaatatc cccagagtgg gtgctgactg ctgctcactg cttgaagaag |
| 5641 | tcctcaaggc cttcatccta caaggtcatc ctgggtgcac accaagaagt gaacctcgaa |
| 5701 | tctcatgttc aggaaataga agtgtctagg ctgttcttgg agcccacaca agcagatatt |
| 5761 | gccttgctaa agctaagcag gcctgccgtc atcactgaca aagtaatgcc agcttgtctg |
| 5821 | ccatccccag actacatggt caccgccagg actgaatgtt acatcactgg ctggggagaa |
| 5881 | acccaaggta cctttgggac tggccttctc aaggaagccc agctccttgt tattgagaat |
| 5941 | gaagtgtgca atcactataa gtatatttgt gctgagcatt tggccagagg cactgacagt |
| 6001 | tgccagggtg acagtggagg gcctctggtt tgcttcgaga aggacaaata cattttacaa |
| 6061 | ggagtcactt cttggggtct tggctgtgca cgccccaata agcctggtgt ctatgctcgt |
| 6121 | gtttcaaggt ttgttacttg gattgaggga atgatgagaa ataattaatt ggacgggaga |
| 6181 | cagagtgaag catcaaccta cttagaagct gaaacgtggg taaggattta gcatgctgga |
| 6241 | aataatagac agcaatcaaa cgaagacact gttcccagct accagctatg ccaaaccttg |
| 6301 | gcatttttgg tatttttgtg tataagcttt taaggtctga ctgacaaatt ctgtattaag |
| 6361 | gtgtcatagc tatgacattt gttaaaaata aactctgcac ttattttgat ttga |

human LPA polypeptide sequence (SEQ ID NO: 1628)
MEHKEVVLLLLLFLKSAAPEQSHVVQDCYHGDGQSYRGTYSTTVTGRTCQAWSSMTPHQHNRTTENYPNAGLIMNYC
RNPDAVAAPYCYTRDPGVRWEYCNLTQCSDAEGTAVAPPTVTPVPSLEAPSEQAPTEQRPGVQECYHGNGQSYRGTY
STTVTGRTCQAWSSMTPHSHSRTPEYYPNAGLIMNYCRNPDAVAAPYCYTRDPGVRWEYCNLTQCSDAEGTAVAPPT
VTPVPSLEAPSEQAPTEQRPGVQECYHGNGQSYRGTYSTTVTGRTCQAWSSMTPHSHSRTPEYYPNAGLIMNYCRNP
DAVAAPYCYTRDPGVRWEYCNLTQCSDAEGTAVAPPTVTPVPSLEAPSEQAPTEQRPGVQECYHGNGQSYRGTYSTT
VTGRTCQAWSSMTPHSHSRTPEYYPNAGLIMNYCRNPDAVAAPYCYTRDPGVRWEYCNLTQCSDAEGTAVAPPTVTP
VPSLEAPSEQAPTEQRPGVQECYHGNGQSYRGTYSTTVTGRTCQAWSSMTPHSHSRTPEYYPNAGLIMNYCRNPDAV
AAPYCYTRDPGVRWEYCNLTQCSDAEGTAVAPPTVTPVPSLEAPSEQAPTEQRPGVQECYHGNGQSYRGTYSTTVTG
RTCQAWSSMTPHSHSRTPEYYPNAGLIMNYCRNPDAVAAPYCYTRDPGVRWEYCNLTQCSDAEGTAVAPPTVTPVPS
LEAPSEQAPTEQRPGVQECYHGNGQSYRGTYSTTVTGRTCQAWSSMTPHSHSRTPEYYPNAGLIMNYCRNPDAVAAP
YCYTRDPGVRWEYCNLTQCSDAEGTAVAPPTVTPVPSLEAPSEQAPTEQRPGVQECYHGNGQSYRGTYSTTVTGRTC
QAWSSMTPHSHSRTPEYYPNAGLIMNYCRNPDPVAAPYCYTRDPSVRWEYCNLTQCSDAEGTAVAPPTITPIPSLEA
PSEQAPTEQRPGVQECYHGNGQSYQGTYFITVTGRTCQAWSSMTPHSHSRTPAYYPNAGLIKNYCRNPDPVAAPWCY
TTDPSVRWEYCNLTRCSDAEWTAFVPPNVILAPSLEAFFEQALTEETPGVQDCYYHYGQSYRGTYSTTVTGRTCQAW
SSMTPHQHSRTPENYPNAGLTRNYCRNPDAEIRPWCYTMDPSVRWEYCNLTQCLVTESSVLATLTVVPDPSTEASSE
EAPTEQSPGVQDCYHGDGQSYRGSFSTTVTGRTCQSWSSMTPHWHQRTTEYYPNGGLTRNYCRNPDAEISPWCYTMD
PNVRWEYCNLTQCPVTESSVLATSTAVSEQAPTEQSPTVQDCYHGDGQSYRGSFSTTVTGRTCQSWSSMTPHWHQRT
TEYYPNGGLTRNYCRNPDAEIRPWCYTMDPSVRWEYCNLTQCPVMESTLLTTPTVVPVPSTELPSEEAPTENSTGVQ
DCYRGDGQSYRGTLSTTITGRTCQSWSSMTPHWHRRIPLYYPNAGLTRNYCRNPDAEIRPWCYTMDPSVRWEYCNLT
RCPVTESSVLTTPTVAPVPSTEAPSEQAPPEKSPVVQDCYHGDGRSYRGISSTTVTGRTCQSWSSMIPHWHQRTPEN
YPNAGLTENYCRNPDSGKQPWCYTTDPCVRWEYCNLTQCSETESGVLETPTVVPVPSMEAHSEAAPTEQTPVVRQCY
HGNGQSYRGTFSTTVTGRTCQSWSSMTPHRHQRTPENYPNDGLIMNYCRNPDADTGPWCFTMDPSIRWEYCNLTRCS
DTEGTVVAPPTVIQVPSLGPPSEQDCMFGNGKGYRGKKATTVTGTPCQEWAAQEPHRHSTFIPGINKWAGLEKNYCR
NPDGDINGPWCYTMNPRKLFDYCDIPLCASSSFDCGKPQVEPKKCPGSIVGGCVAHPHSWPWQVSLRTRFGKHFCGG
TLISPEWVLTAAHCLKKSSRPSSYKVILGAHQEVNLESHVQEIEVSRLFLEPTQADIALLKLSRPAVITDKVMPACL
PSPDYMVTARTECYITGWGETQGTFGTGLLKEAQLLVIENEVCNHYKYICAEHLARGTDSCQGDSGGPLVCFEKDKY
ILQGVTSWGLGCARPNKPGVYARVSRFVTWIEGMMRNN
cynomolgus LPA mRNA sequence (SEQ ID NO: 1629)

| | |
|---|---|
| 1 | gatgctgcat acttaatgtc gaaaggttgc ttcatccaag agcctggagt tttcagagac |
| 61 | actgtcctga aactatgtcc tgaaactatg tcattgaaac tgaaacattg tcctgaagct |
| 121 | ggtattgggc aataccagcg cctgcaggca acagctcgga tgcacttaag atttaaatat |
| 181 | tacccacaga agttctggct tgtctgggaa aaccttttgc taaacagaag agcaacattt |
| 241 | tttttttttt cttttctgga atttgtaaac agcatttatt ctcagcctta ccttccaaac |
| 301 | gttgcacttg gaacattgct gggccccgtg gaaacagaag cgaacgtcag ccaggccggc |
| 361 | agggggcggc agaccccaca cttcgccggg cgccctcacc tccctgggag ggagtgtgca |
| 421 | gctgccaaaa tcttcggcgg ggttcagtcc aagcgacttc agccagcaga tggtcattct |
| 481 | cctgtgaccg tgtgtactac agactgtttc aaaaccgggc aggcaattaa caatgggaat |
| 541 | tctgccatca tcgctgacaa agtcatccca gtttgtctgc catccccaaa ttatgtggtc |
| 601 | gccaaccaga ctgaatgtta tgtcactggc tggggagaaa cccaagcact acctgagcaa |
| 661 | agccatgtgg tccaggattg ctaccatggt gatggacaga gttatcaagg cacatcctcc |
| 721 | accactgtca caggaaggac ctgccaagct tggtcatcta tggaaccaca tcagcataat |
| 781 | agaaccacag aaaactaccc aaatgctggc ttgatcagga actactgcag gaatccagat |
| 841 | cctgtggcag ccccttattg ttatacgatg gatcccaatg tcaggtggga gtactgcaac |
| 901 | ctgacacaat gctcagacgc agaagggact gccgtcgcac ctccgaatgt caccccggtt |
| 961 | ccaagcctag aggctccttc cgaacaagca ccgactgagc aaaggcctgg ggtgcaggag |
| 1021 | tgctaccacg gtaatggaca gagttatcga ggcacatact tcaccactgt gacaggaaga |
| 1081 | acctgccaag cttggtcatc tatgacaccg cactctcata gtcggacccc ggaaaactac |
| 1141 | ccaaatggtg gcttgatcag gaactactgc aggaatccag atcctgtggc agccccttat |
| 1201 | tgttatacca tggatcccaa tgtcaggtgg gagtactgca acctgacaca atgctcagac |
| 1261 | gcagaaggga ttgccgtcac acctctgact gttaccccgg ttccaagcct agaggctcct |
| 1321 | tccaagcaag caccaactga gcaaaggcct ggtgtccagg agtgctacca cggtaatgga |
| 1381 | cagagttatc gaggcacata cttcaccact gtgacaggaa gaacctgcca agcttggtca |
| 1441 | tctatgacac cacattctca tagtcgtacc ccagaaaact acccaaatgg tggcttgatc |
| 1501 | aggaactact gcaggaatcc agatcctgtg gcagcccctt attgttatac catggatccc |
| 1561 | aatgtcaggt gggagtactg caacctgaca caatgctcag acgcagaagg gactgccgtc |
| 1621 | gcacctccga ctgtcacccc ggttccaagc ctagaggctc cttccgaaca agcaccgact |
| 1681 | gagcaaaggc ctggggtgca ggagtgctac cacggtaatg gacagagtta tcgaggcaca |
| 1741 | tacttcacca ctgtgacagg aagaacctgc caagcttggt catctatgac accgcactct |
| 1801 | catagtcgga ccccggaaaa ctacccaaat ggtggcttga tcaggaacta ctgcaggaat |
| 1861 | ccagatcctg tggcagcccc ttattgttat accatggatc ccaatgtcag gtgggagtac |
| 1921 | tgcaacctga cacaatgctc agacgcagaa gggactgccg tcgcacctcc gaatgtcacc |
| 1981 | ccggttccaa gcctagaggc tccttctgag caagcaccaa ctgagcaaag gcttggggtg |
| 2041 | caggagtgct accacggtaa tggacagagt tatcgaggca catacttcac cactgtgaca |
| 2101 | ggaagaacct gccaagcttg gtcatctatg acaccacact ctcatagtcg gaccccagaa |
| 2161 | aactacccaa atgctggctt ggtcaagaac tactgccgaa atccagatcc tgtggcagcc |
| 2221 | ccttggtgtt atacaacgga tcccagtgtc aggtgggagt actgcaacct gacacgatgc |
| 2281 | tcagatgcag aagggactgc tgttgtgcct ccaaatatta ttccggttcc aagcctagag |
| 2341 | gcttttcttg aacaagaacc gactgaggaa acccccgggg tacaggagtg ctactaccat |
| 2401 | tatggacaga gttatagagg cacatactcc accactgtta caggaagaac ttgccaagct |
| 2461 | tggtcatcta tgacaccaca ccagcatagt cggaccccaa aaaactatcc aaatgctggc |
| 2521 | ctgaccagga actactgcag gaatccagat gctgagattc gcccttggtg ttataccatg |
| 2581 | gatcccagtg tcaggtggga gtactgcaac ctgacacaat gtctggtgac agaatcaagt |
| 2641 | gtccttgaaa ctctcacagt ggtcccagat ccaagcacac aggcttcttc tgaagaagca |
| 2701 | ccaacggagc aaagtcccga ggtccaggac tgctaccatg gtgatggaca gagttatcga |
| 2761 | ggctcattct ccaccactgt cacaggaagg acatgtcagt cttggtcctc tatgacacca |
| 2821 | cactggcatc agaggacaac agaatattat ccagatggtg gcctgaccag gaactactgc |
| 2881 | aggaatccag atgctgagat tcgcccttgg tgttatacca tggatcccag tgtcaggtgg |
| 2941 | gagtactgca acctgacaca atgtccagtg acagaatcaa gtgtcctcgc aacgtccatg |
| 3001 . | gctgtttctg aacaagcacc aatggagcaa agccccgggg tccaggactg ctaccatggt |
| 3061 | gatggacaga gttatcgagg ttcattctcc accactgtca caggaaggac atgtcagtct |
| 3121 | tggtcctcta tgacaccaca ctggcatcag aggaccatag aatactaccc aaatggtggc |
| 3181 | ctgaccaaga actactgcag gaatccagat gctgagattc gcccttggtg ttataccatg |
| 3241 | gatcccagag tcagatggga gtactgcaac ctgacacaat gtgtggtgat ggaatcaagt |
| 3301 | gtccttgcaa ctcccatggt ggtcccagtt ccaagcagag aggttccttc tgaagaagca |
| 3361 | ccaactgaaa acagccctgg ggtccaggac tgctaccaag gtgatggaca gagttatcga |
| 3421 | ggcacattct ccaccactat cacaggaaga acatgtcagt cttggttgtc tatgacacca |
| 3481 | catcggcatc ggaggatccc attacgctat ccaaatgctg gcctgaccag gaactattgc |
| 3541 | agaaatccag atgctgagat tcgcccttgg tgttacacca tggatcccag tgtcaggtgg |
| 3601 | gagtactgca acctgacaca atgtccagtg acagaatcaa gtgtcctcac aactcccacg |
| 3661 | gtggtcccgg ttccaagcac agaggctcct tctgaacaag caccacctga gaaaagccct |
| 3721 | gtggtccagg attgctacca tggtgatgga cagagttatc gaggcacatc ctccaccact |
| 3781 | gtcacaggaa ggaactgtca gtcttggtca tctatgatac cacactggca tcagaggacc |
| 3841 | ccagaaaact acccaaatgc tggcctgacc aggaactact gcaggaatcc agattctggg |
| 3901 | aaacaaccct ggtgttacac gactgatcca tgtgtgaggt gggagtactg caacctgaca |
| 3961 | caatgctcag aaacagaatc aggtgtccta gagactccca ctgttgttcc ggttccaagc |
| 4021 | atggaagctc attctgaagc agcaccaact gagcaaactc ctgtggtcca gcagtgctac |
| 4081 | catggtaatg gacagagtta tcgaggcaca ttctccacca ctgtcacagg aaggacatgt |
| 4141 | caatcttggt catccatgac accacaccag cataagagga ccccggaaaa ccacccaaat |
| 4201 | gatgacttga caatgaacta ctgcaggaat ccagatgctg acacaggccc ttggtgtttt |
| 4261 | accatggacc ccagcgtcag gcgggagtac tgcaacctga cgcgatgctc agacacagaa |
| 4321 | gggactgtgg tcacacctcc gactgttatc ccggttccaa gcctagaggc tccttctgaa |
| 4381 | caagcatcct cttcatttga ttgtgggaag cctcaagtgg agccaaagaa atgtcctgga |
| 4441 | agcattgtag gtgggtgtgt ggcccaccca cattcctggc cctggcaagt cagtcttaga |
| 4501 | acaaggtttg gaaagcactt ctgtggaggc accttaatat ccccagagtg ggtgctgact |
| 4561 | gctgcttgct gcttggagac gttctcaagg ccttccttct acaaggtcat cctgggtgca |
| 4621 | caccaagaag tgaatctcga atctcacgtt caagaaatag aagtgtctag gttgttcttg |
| 4681 | gagcccatag gagcagatat tgccttgcta aagctaagca ggcctgccat catcactgac |
| 4741 | aaagtaatcc cagcctgtct gccgtctcca aattacgtga tcaccgtctg gactgaatgt |
| 4801 | tacatcactg gctggggaga aacccaaggt acctttgggg ctggccttct caaggaagcc |
| 4861 | cagcttcatg tgattgagaa tacagtgtgc aatcactacg agtttctgaa tggaagagtc |
| 4921 | aaatccaccg agctctgtgc tgggcatttg gccggaggca ctgacagatg ccagggtgac |
| 4981 | agtggagggc ctgtggtttg cttcgacaag gacaaataca ttttacgagg aataacttct |
| 5041 | tggggtcctg gctgtgcatg ccccaataag cctggtgtct atgttcgtgt ttcaagcttt |
| 5101 | gtcacttgga ttgagggagt gatgagaaat aattaattga acaagagaca gagtgaagca |
| 5161 | ttgactcacc tagaggctag aatgggggta gggatttagc acgctggaaa taacggacag |
| 5221 | taatcaaacg aagacactgt ccccagctac caactatgcc aaacctcagc atttttggta |
| 5281 | ttattgtgta taagcttttc ccgtctgact gctgggttct ccaataaggt gacatagcta |
| 5341 | tgccatttgt taaaaataaa ctctgtactt attttgattt gagtaaa |

cynomolgus LPA polypeptide sequence (SEQ ID NO: 1630)
MSKGCFIQEPGVFRDTVLKLCPETMSLKLKHCPEAGIGQYQRLQATARMHLRFKYYPQKFWLVWENLLLN
RRATFFFFSFLEFVNSIYSQPYLPNVALGTLLGPVETEANVSQAGRGRQTPHFAGRPHLPGRECAAAKIF
GGVQSKRLQPADGHSPVTVCTTDCFKTGQAINNGNSAIIADKVIPVCLPSPNYVVANQTECYVTGWGETQ
ALPEQSHVVQDCYHGDGQSYQGTSSTTVTGRTCQAWSSMEPHQHNRTTENYPNAGLIRNYCRNPDPVAAP
YCYTMDPNVRWEYCNLTQCSDAEGTAVAPPNVTPVPSLEAPSEQAPTEQRPGVQECYHGNGQSYRGTYFT
TVTGRTCQAWSSMTPHSHSRTPENYPNGGLIRNYCRNPDPVAAPYCYTMDPNVRWEYCNLTQCSDAEGIA
VTPLTVTPVPSLEAPSKQAPTEQRPGVQECYHGNGQSYRGTYFTTVTGRTCQAWSSMTPHSHSRTPENYP
NGGLIRNYCRNPDPVAAPYCYTMDPNVRWEYCNLTQCSDAEGTAVAPPTVTPVPSLEAPSEQAPTEQRPG
VQECYHGNGQSYRGTYFTTVIGRTCQAWSSMTPHSHSRTPENYPNGGLIRNYCRNPDPVAAPYCYTMDPN
VRWEYCNLTQCSDAEGTAVAPPNVTPVPSLEAPSEQAPTEQRLGVQECYHGNGQSYRGTYFTTVIGRICQ
AWSSMTPHSHSRTPENYPNAGLVKNYCRNPDPVAAPWCYTTDPSVRWEYCNLTRCSDAEGTAVVPPNIIP
VPSLEAFLEQEPTEETPGVQECYYHYGQSYRGTYSTTVTGRTCQAWSSMTPHQHSRTPKNYPNAGLTRNY
CRNPDAEIRPWCYTMDPSVRWEYCNLTQCLVTESSVLETLTVVPDPSTQASSEEAPTEQSPEVQDCYHGD
GQSYRGSFSTTVTGRTCQSWSSMTPHWHQRTTEYYPDGGLTRNYCRNPDAEIRPWCYTMDPSVRWEYCNL
TQCPVTESSVLATSMAVSEQAPMEQSPGVQDCYHGDGQSYRGSFSTTVIGRICQSWSSMTPHWHQRTIEY
YPNGGLIKNYCRNPDAEIRPWCYTMDPRVRWEYCNLTQCVVMESSVLATPMVVPVPSREVPSEEAPTENS
PGVQDCYQGDGQSYRGIFSTTITGRTCQSWLSMTPHRHRRIPLRYPNAGLTRNYCRNPDAEIRPWCYTMD
PSVRWEYCNLTQCPVTESSVLTTPTVVPVPSTEAPSEQAPPEKSPVVQDCYHGDGQSYRGTSSTTVTGRN
CQSWSSMIPHWHQRTPENYPNAGLTRNYCRNPDSGKQPWCYTTDPCVRWEYCNLTQCSETESGVLETPTV
VPVPSMEAHSEAAPTEQTPVVQQCYHGNGQSYRGTFSTTVTGRTCQSWSSMTPHQHKRTPENHPNDDLTM
NYCRNPDADTGPWCFTMDPSVRREYCNLTRCSDTEGTVVTPPTVIPVPSLEAPSEQASSSFDCGKPQVEP
KKCPGSIVGGCVAHPHSWPWQVSLRTRFGKHFCGGTLISPEWVLTAACCLETFSRPSFYKVILGAHQEVN
LESHVQEIEVSRLFLEPIGADIALLKLSRPAIITDKVIPACLPSPNYVITVWTECYITGWGETQGTFGAG
LLKEAQLHVIENTVCNHYEFLNGRVKSTELCAGHLAGGTDRCQGDSGGPVVCFDKDKYILRGITSWGPGC
ACPNKPGVYVRVSSFVTWIEGVMRNN

The application's sequence listing, which the Patent Office published only in electronic form, follows.

SEQUENCE LISTING (1632 sequences)

SEQ ID NO: 1 - RNA, 19 nt, Artificial Sequence
  source: /note="Description of Artificial Sequence: Synthetic oligonucleotide"
accuuuggggcuggcuuuc

SEQ ID NO: 2 - RNA, 19 nt, Artificial Sequence
  source: /note="Description of Artificial Sequence: Synthetic oligonucleotide"
gccaugugguccaggauug

SEQ ID NO: 3 - RNA, 19 nt, Artificial Sequence
  source: /note="Description of Artificial Sequence: Synthetic oligonucleotide"
acagaguuaucgaggcacg

SEQ ID NO: 4 - RNA, 19 nt, Artificial Sequence
  source: /note="Description of Artificial Sequence: Synthetic oligonucleotide"
cagaguuaucgaggcacgu

SEQ ID NO: 5 - RNA, 19 nt, Artificial Sequence
  source: /note="Description of Artificial Sequence: Synthetic oligonucleotide"
agaguuaucgaggcacgua

SEQ ID NO: 6 - RNA, 19 nt, Artificial Sequence
  source: /note="Description of Artificial Sequence: Synthetic oligonucleotide"
gaguuaucgaggcacguac

SEQ ID NO: 7 - RNA, 19 nt, Artificial Sequence
  source: /note="Description of Artificial Sequence: Synthetic oligonucleotide"
aguuaucgaggcacguacu

SEQ ID NO: 8 - RNA, 19 nt, Artificial Sequence
  source: /note="Description of Artificial Sequence: Synthetic oligonucleotide"
uacuccaccacugucacag

SEQ ID NO: 9 - RNA, 19 nt, Artificial Sequence
  source: /note="Description of Artificial Sequence: Synthetic oligonucleotide"
cuccaccacugucacagga

SEQ ID NO: 10 - RNA, 19 nt, Artificial Sequence
  source: /note="Description of Artificial Sequence: Synthetic oligonucleotide"
aggaccugccaagcuuggu

SEQ ID NO: 11 - RNA, 19 nt, Artificial Sequence
  source: /note="Description of Artificial Sequence: Synthetic oligonucleotide"
gaccugccaagcuugguca

SEQ ID NO: 12 - RNA, 19 nt, Artificial Sequence
  source: /note="Description of Artificial Sequence: Synthetic oligonucleotide"
accugccaagcuuggucau

SEQ ID NO: 13 - RNA, 19 nt, Artificial Sequence
  source: /note="Description of Artificial Sequence: Synthetic oligonucleotide"
ccugccaagcuuggucauc

SEQ ID NO: 14 - RNA, 19 nt, Artificial Sequence
  source: /note="Description of Artificial Sequence: Synthetic oligonucleotide"
gccaagcuuggucaucuau

SEQ ID NO: 15 - RNA, 19 nt, Artificial Sequence
  source: /note="Description of Artificial Sequence: Synthetic oligonucleotide"
ccaagcuuggucaucuaug

SEQ ID NO: 16 - RNA, 19 nt, Artificial Sequence
  source: /note="Description of Artificial Sequence: Synthetic oligonucleotide"
cauaauaggaccacagaaa

SEQ ID NO: 17 - RNA, 19 nt, Artificial Sequence
  source: /note="Description of Artificial Sequence: Synthetic oligonucleotide"
uaauaggaccacagaaaac

SEQ ID NO: 18 - RNA, 19 nt, Artificial Sequence
  source: /note="Description of Artificial Sequence: Synthetic oligonucleotide"
aauaggaccacagaaaacu

SEQ ID NO: 19 - RNA, 19 nt, Artificial Sequence
  source: /note="Description of Artificial Sequence: Synthetic oligonucleotide"
auaggaccacagaaaacua

SEQ ID NO: 20 - RNA, 19 nt, Artificial Sequence
  source: /note="Description of Artificial Sequence: Synthetic oligonucleotide"
uaggaccacagaaaacuac

SEQ ID NO: 21 - RNA, 19 nt, Artificial Sequence
  source: /note="Description of Artificial Sequence: Synthetic oligonucleotide"
aaaugcuggcuugaucaug

SEQ ID NO: 22 - RNA, 19 nt, Artificial Sequence
  source: /note="Description of Artificial Sequence: Synthetic oligonucleotide"
uggcuugaucaugaacuac

SEQ ID NO: 23 - RNA, 19 nt, Artificial Sequence
  source: /note="Description of Artificial Sequence: Synthetic oligonucleotide"
ggcuugaucaugaacuacu

SEQ ID NO: 24 - RNA, 19 nt, Artificial Sequence
  source: /note="Description of Artificial Sequence: Synthetic oligonucleotide"
agcuccuuauuguuauacg

SEQ ID NO: 25 - RNA, 19 nt, Artificial Sequence
  source: /note="Description of Artificial Sequence: Synthetic oligonucleotide"
gcuccuuauuguuauacga

SEQ ID NO: 26 - RNA, 19 nt, Artificial Sequence
  source: /note="Description of Artificial Sequence: Synthetic oligonucleotide"
aguacugcaaccugacgca

SEQ ID NO: 27 - RNA, 19 nt, Artificial Sequence
  source: /note="Description of Artificial Sequence: Synthetic oligonucleotide"
guacugcaaccugacgcaa

SEQ ID NO: 28 - RNA, 19 nt, Artificial Sequence
  source: /note="Description of Artificial Sequence: Synthetic oligonucleotide"
uacugcaaccugacgcaau

SEQ ID NO: 29 - RNA, 19 nt, Artificial Sequence
  source: /note="Description of Artificial Sequence: Synthetic oligonucleotide"
ugcaaccugacgcaaugcu

SEQ ID NO: 30 - RNA, 19 nt, Artificial Sequence
  source: /note="Description of Artificial Sequence: Synthetic oligonucleotide"
gcaaccugacgcaaugcuc

SEQ ID NO: 31 - RNA, 19 nt, Artificial Sequence
  source: /note="Description of Artificial Sequence: Synthetic oligonucleotide"
caaccugacgcaaugcuca

SEQ ID NO: 32 - RNA, 19 nt, Artificial Sequence
  source: /note="Description of Artificial Sequence: Synthetic oligonucleotide"
aaccugacgcaaugcucag

SEQ ID NO: 33 - RNA, 19 nt, Artificial Sequence
  source: /note="Description of Artificial Sequence: Synthetic oligonucleotide"
accugacgcaaugcucaga

SEQ ID NO: 34 - RNA, 19 nt, Artificial Sequence
  source: /note="Description of Artificial Sequence: Synthetic oligonucleotide"
ccugacgcaaugcucagac

SEQ ID NO: 35 - RNA, 19 nt, Artificial Sequence
  source: /note="Description of Artificial Sequence: Synthetic oligonucleotide"
cugacgcaaugcucagacg

SEQ ID NO: 36 - RNA, 19 nt, Artificial Sequence
  source: /note="Description of Artificial Sequence: Synthetic oligonucleotide"
ugacgcaaugcucagacgc

SEQ ID NO: 37 - RNA, 19 nt, Artificial Sequence
  source: /note="Description of Artificial Sequence: Synthetic oligonucleotide"
uccgacuguuaccccgguu

SEQ ID NO: 38 - RNA, 19 nt, Artificial Sequence
  source: /note="Description of Artificial Sequence: Synthetic oligonucleotide"
acuguuaccccgguuccaa

SEQ ID NO: 39 - RNA, 19 nt, Artificial Sequence
  source: /note="Description of Artificial Sequence: Synthetic oligonucleotide"
cuguuaccccgguuccaag

SEQ ID NO: 40 - RNA, 19 nt, Artificial Sequence
  source: /note="Description of Artificial Sequence: Synthetic oligonucleotide"
uguuaccccgguuccaagc

SEQ ID NO: 41 - RNA, 19 nt, Artificial Sequence
  source: /note="Description of Artificial Sequence: Synthetic oligonucleotide"
uuaccccgguuccaagccu

SEQ ID NO: 42 - RNA, 19 nt, Artificial Sequence
  source: /note="Description of Artificial Sequence: Synthetic oligonucleotide"
uaccccgguuccaagccua

SEQ ID NO: 43 - RNA, 19 nt, Artificial Sequence
  source: /note="Description of Artificial Sequence: Synthetic oligonucleotide"
gguuccaagccuagaggcu

SEQ ID NO: 44 - RNA, 19 nt, Artificial Sequence
  source: /note="Description of Artificial Sequence: Synthetic oligonucleotide"
guuccaagccuagaggcuc

SEQ ID NO: 45 - RNA, 19 nt, Artificial Sequence
  source: /note="Description of Artificial Sequence: Synthetic oligonucleotide"
ccuagaggcuccuuccgaa

SEQ ID NO: 46 - RNA, 19 nt, Artificial Sequence
  source: /note="Description of Artificial Sequence: Synthetic oligonucleotide"
cuagaggcuccuuccgaac

SEQ ID NO: 47 - RNA, 19 nt, Artificial Sequence
  source: /note="Description of Artificial Sequence: Synthetic oligonucleotide"
ggcuccuuccgaacaagca

SEQ ID NO: 48 - RNA, 19 nt, Artificial Sequence
  source: /note="Description of Artificial Sequence: Synthetic oligonucleotide"
ccuuccgaacaagcaccga

SEQ ID NO: 49 - RNA, 19 nt, Artificial Sequence
  source: /note="Description of Artificial Sequence: Synthetic oligonucleotide"
cuuccgaacaagcaccgac

SEQ ID NO: 50 - RNA, 19 nt, Artificial Sequence
  source: /note="Description of Artificial Sequence: Synthetic oligonucleotide"
uuccgaacaagcaccgacu

SEQ ID NO: 51 - RNA, 19 nt, Artificial Sequence
  source: /note="Description of Artificial Sequence: Synthetic oligonucleotide"
uccgaacaagcaccgacug

SEQ ID NO: 52 - RNA, 19 nt, Artificial Sequence
  source: /note="Description of Artificial Sequence: Synthetic oligonucleotide"
ccgaacaagcaccgacuga

SEQ ID NO: 53 - RNA, 19 nt, Artificial Sequence
  source: /note="Description of Artificial Sequence: Synthetic oligonucleotide"
gaacaagcaccgacugagc

SEQ ID NO: 54 - RNA, 19 nt, Artificial Sequence
  source: /note="Description of Artificial Sequence: Synthetic oligonucleotide"
aacaagcaccgacugagca

SEQ ID NO: 55 - RNA, 19 nt, Artificial Sequence
  source: /note="Description of Artificial Sequence: Synthetic oligonucleotide"
acaagcaccgacugagcaa

SEQ ID NO: 56 - RNA, 19 nt, Artificial Sequence
  source: /note="Description of Artificial Sequence: Synthetic oligonucleotide"
caagcaccgacugagcaaa

SEQ ID NO: 57 - RNA, 19 nt, Artificial Sequence
  source: /note="Description of Artificial Sequence: Synthetic oligonucleotide"
aagcaccgacugagcaaag

SEQ ID NO: 58 - RNA, 19 nt, Artificial Sequence
  source: /note="Description of Artificial Sequence: Synthetic oligonucleotide"
agcaccgacugagcaaagg

SEQ ID NO: 59 - RNA, 19 nt, Artificial Sequence
  source: /note="Description of Artificial Sequence: Synthetic oligonucleotide"
ugguaauggacagaguuau

SEQ ID NO: 60 - RNA, 19 nt, Artificial Sequence
  source: /note="Description of Artificial Sequence: Synthetic oligonucleotide"
guaauggacagaguuaucg

SEQ ID NO: 61 - RNA, 19 nt, Artificial Sequence
  source: /note="Description of Artificial Sequence: Synthetic oligonucleotide"
uaauggacagaguuaucga

SEQ ID NO: 62 - RNA, 19 nt, Artificial Sequence
  source: /note="Description of Artificial Sequence: Synthetic oligonucleotide"
agaguuaucgaggcacaua

SEQ ID NO: 63 - RNA, 19 nt, Artificial Sequence
  source: /note="Description of Artificial Sequence: Synthetic oligonucleotide"
gaguuaucgaggcacauac

SEQ ID NO: 64 - RNA, 19 nt, Artificial Sequence
  source: /note="Description of Artificial Sequence: Synthetic oligonucleotide"
aguuaucgaggcacauacu

SEQ ID NO: 65 - RNA, 19 nt, Artificial Sequence
  source: /note="Description of Artificial Sequence: Synthetic oligonucleotide"
guuaucgaggcacauacuc

SEQ ID NO: 66 - RNA, 19 nt, Artificial Sequence
  source: /note="Description of Artificial Sequence: Synthetic oligonucleotide"
uuaucgaggcacauacucc

SEQ ID NO: 67 - RNA, 19 nt, Artificial Sequence
  source: /note="Description of Artificial Sequence: Synthetic oligonucleotide"
ggcacauacuccaccacug

SEQ ID NO: 68 - RNA, 19 nt, Artificial Sequence
  source: /note="Description of Artificial Sequence: Synthetic oligonucleotide"
cauacuccaccacugucac

SEQ ID NO: 69 - RNA, 19 nt, Artificial Sequence
  source: /note="Description of Artificial Sequence: Synthetic oligonucleotide"
ggaagaaccugccaagcuu

SEQ ID NO: 70 - RNA, 19 nt, Artificial Sequence
  source: /note="Description of Artificial Sequence: Synthetic oligonucleotide"
uaugacaccacacucgcau

SEQ ID NO: 71 - RNA, 19 nt, Artificial Sequence
  source: /note="Description of Artificial Sequence: Synthetic oligonucleotide"
augacaccacacucgcaua

SEQ ID NO: 72 - RNA, 19 nt, Artificial Sequence
  source: /note="Description of Artificial Sequence: Synthetic oligonucleotide"
ugacaccacacucgcauag

SEQ ID NO: 73 - RNA, 19 nt, Artificial Sequence
  source: /note="Description of Artificial Sequence: Synthetic oligonucleotide"
gacaccacacucgcauagu

SEQ ID NO: 74 - RNA, 19 nt, Artificial Sequence
  source: /note="Description of Artificial Sequence: Synthetic oligonucleotide"
acaccacacucgcauaguc

SEQ ID NO: 75 - RNA, 19 nt, Artificial Sequence
  source: /note="Description of Artificial Sequence: Synthetic oligonucleotide"
accacacucgcauagucgg

SEQ ID NO: 76 - RNA, 19 nt, Artificial Sequence
  source: /note="Description of Artificial Sequence: Synthetic oligonucleotide"
ccacacucgcauagucgga

SEQ ID NO: 77 - RNA, 19 nt, Artificial Sequence
  source: /note="Description of Artificial Sequence: Synthetic oligonucleotide"
cacacucgcauagucggac

SEQ ID NO: 78 - RNA, 19 nt, Artificial Sequence
  source: /note="Description of Artificial Sequence: Synthetic oligonucleotide"
acacucgcauagucggacc

SEQ ID NO: 79 - RNA, 19 nt, Artificial Sequence
  source: /note="Description of Artificial Sequence: Synthetic oligonucleotide"
cauagucggaccccagaau

SEQ ID NO: 80 - RNA, 19 nt, Artificial Sequence
  source: /note="Description of Artificial Sequence: Synthetic oligonucleotide"
auagucggaccccagaaua

SEQ ID NO: 81 - RNA, 19 nt, Artificial Sequence
  source: /note="Description of Artificial Sequence: Synthetic oligonucleotide"
uagucggaccccagaauac

SEQ ID NO: 82 - RNA, 19 nt, Artificial Sequence
  source: /note="Description of Artificial Sequence: Synthetic oligonucleotide"
agucggaccccagaauacu

SEQ ID NO: 83 - RNA, 19 nt, Artificial Sequence
  source: /note="Description of Artificial Sequence: Synthetic oligonucleotide"
gucggaccccagaauacua

SEQ ID NO: 84 - RNA, 19 nt, Artificial Sequence
  source: /note="Description of Artificial Sequence: Synthetic oligonucleotide"
ucggaccccagaauacuac

SEQ ID NO: 85 - RNA, 19 nt, Artificial Sequence
  source: /note="Description of Artificial Sequence: Synthetic oligonucleotide"
cggaccccagaauacuacc

SEQ ID NO: 86 - RNA, 19 nt, Artificial Sequence
  source: /note="Description of Artificial Sequence: Synthetic oligonucleotide"
acaagcaccgacugagcag

SEQ ID NO: 87 - RNA, 19 nt, Artificial Sequence
  source: /note="Description of Artificial Sequence: Synthetic oligonucleotide"
aagcaccgacugagcagag

SEQ ID NO: 88 - RNA, 19 nt, Artificial Sequence
  source: /note="Description of Artificial Sequence: Synthetic oligonucleotide"
cacgguaauggacagaguu

SEQ ID NO: 89 - RNA, 19 nt, Artificial Sequence
  source: /note="Description of Artificial Sequence: Synthetic oligonucleotide"
acgguaauggacagaguua

SEQ ID NO: 90 - RNA, 19 nt, Artificial Sequence
  source: /note="Description of Artificial Sequence: Synthetic oligonucleotide"
cgguaauggacagaguuau

SEQ ID NO: 91 - RNA, 19 nt, Artificial Sequence
  source: /note="Description of Artificial Sequence: Synthetic oligonucleotide"
uuaccccgauuccaagccu

SEQ ID NO: 92 - RNA, 19 nt, Artificial Sequence
  source: /note="Description of Artificial Sequence: Synthetic oligonucleotide"
uaccccgauuccaagccua

SEQ ID NO: 93 - RNA, 19 nt, Artificial Sequence
  source: /note="Description of Artificial Sequence: Synthetic oligonucleotide"
accccgauuccaagccuag

SEQ ID NO: 94 - RNA, 19 nt, Artificial Sequence
  source: /note="Description of Artificial Sequence: Synthetic oligonucleotide"
ccccgauuccaagccuaga

SEQ ID NO: 95 - RNA, 19 nt, Artificial Sequence
  source: /note="Description of Artificial Sequence: Synthetic oligonucleotide"
cccgauuccaagccuagag

SEQ ID NO: 96 - RNA, 19 nt, Artificial Sequence
  source: /note="Description of Artificial Sequence: Synthetic oligonucleotide"
ccgauuccaagccuagagg

SEQ ID NO: 97 - RNA, 19 nt, Artificial Sequence
  source: /note="Description of Artificial Sequence: Synthetic oligonucleotide"
cgauuccaagccuagaggc

SEQ ID NO: 98 - RNA, 19 nt, Artificial Sequence
  source: /note="Description of Artificial Sequence: Synthetic oligonucleotide"
gauuccaagccuagaggcu

SEQ ID NO: 99 - RNA, 19 nt, Artificial Sequence
  source: /note="Description of Artificial Sequence: Synthetic oligonucleotide"
accaacugagcaaaggccu

SEQ ID NO: 100 - RNA, 19 nt, Artificial Sequence
  source: /note="Description of Artificial Sequence: Synthetic oligonucleotide"
uaccacggaaauggacaga

SEQ ID NO: 101 - RNA, 19 nt, Artificial Sequence
  source: /note="Description of Artificial Sequence: Synthetic oligonucleotide"
accacggaaauggacagag

SEQ ID NO: 102 - RNA, 19 nt, Artificial Sequence
  source: /note="Description of Artificial Sequence: Synthetic oligonucleotide"
cacggaaauggacagaguu

SEQ ID NO: 103 - RNA, 19 nt, Artificial Sequence
  source: /note="Description of Artificial Sequence: Synthetic oligonucleotide"
acggaaauggacagaguua

SEQ ID NO: 104 - RNA, 19 nt, Artificial Sequence
  source: /note="Description of Artificial Sequence: Synthetic oligonucleotide"
cggaaauggacagaguuau

SEQ ID NO: 105 - RNA, 19 nt, Artificial Sequence
  source: /note="Description of Artificial Sequence: Synthetic oligonucleotide"
aauggacagaguuaucaag

SEQ ID NO: 106 - RNA, 19 nt, Artificial Sequence
  source: /note="Description of Artificial Sequence: Synthetic oligonucleotide"
auggacagaguuaucaagg

SEQ ID NO: 107 - RNA, 19 nt, Artificial Sequence
  source: /note="Description of Artificial Sequence: Synthetic oligonucleotide"
ggacagaguuaucaaggca

SEQ ID NO: 108 - RNA, 19 nt, Artificial Sequence
  source: /note="Description of Artificial Sequence: Synthetic oligonucleotide"
gacagaguuaucaaggcac

SEQ ID NO: 109 - RNA, 19 nt, Artificial Sequence
  source: /note="Description of Artificial Sequence: Synthetic oligonucleotide"
acagaguuaucaaggcaca

SEQ ID NO: 110 - RNA, 19 nt, Artificial Sequence
  source: /note="Description of Artificial Sequence: Synthetic oligonucleotide"
gaguuaucaaggcacauac

SEQ ID NO: 111 - RNA, 19 nt, Artificial Sequence
  source: /note="Description of Artificial Sequence: Synthetic oligonucleotide"
aguuaucaaggcacauacu

SEQ ID NO: 112 - RNA, 19 nt, Artificial Sequence
  source: /note="Description of Artificial Sequence: Synthetic oligonucleotide"
guuaucaaggcacauacuu

SEQ ID NO: 113 - RNA, 19 nt, Artificial Sequence
  source: /note="Description of Artificial Sequence: Synthetic oligonucleotide"
aaaugcuggcuugaucaag

SEQ ID NO: 114 - RNA, 19 nt, Artificial Sequence
  source: /note="Description of Artificial Sequence: Synthetic oligonucleotide"
gcuugaucaagaacuacug

SEQ ID NO: 115 - RNA, 19 nt, Artificial Sequence
  source: /note="Description of Artificial Sequence: Synthetic oligonucleotide"
gccccuugguguuauacaa

SEQ ID NO: 116 - RNA, 19 nt, Artificial Sequence
  source: /note="Description of Artificial Sequence: Synthetic oligonucleotide"
cccuugguguuauacaaca

SEQ ID NO: 117 - RNA, 19 nt, Artificial Sequence
  source: /note="Description of Artificial Sequence: Synthetic oligonucleotide"
uugguguuauacaacagau

SEQ ID NO: 118 - RNA, 19 nt, Artificial Sequence
  source: /note="Description of Artificial Sequence: Synthetic oligonucleotide"
guguuauacaacagauccc

SEQ ID NO: 119 - RNA, 19 nt, Artificial Sequence
  source: /note="Description of Artificial Sequence: Synthetic oligonucleotide"
uauacaacagaucccagug

SEQ ID NO: 120 - RNA, 19 nt, Artificial Sequence
  source: /note="Description of Artificial Sequence: Synthetic oligonucleotide"
ugcaaccugacacaaugcc

SEQ ID NO: 121 - RNA, 19 nt, Artificial Sequence
  source: /note="Description of Artificial Sequence: Synthetic oligonucleotide"
gcaaccugacacaaugccu

SEQ ID NO: 122 - RNA, 19 nt, Artificial Sequence
  source: /note="Description of Artificial Sequence: Synthetic oligonucleotide"
aacucucacggugguccca

SEQ ID NO: 123 - RNA, 19 nt, Artificial Sequence
  source: /note="Description of Artificial Sequence: Synthetic oligonucleotide"
ucucacgguggucccagau

SEQ ID NO: 124 - RNA, 19 nt, Artificial Sequence
  source: /note="Description of Artificial Sequence: Synthetic oligonucleotide"
acgguggucccagauccaa

SEQ ID NO: 125 - RNA, 19 nt, Artificial Sequence
  source: /note="Description of Artificial Sequence: Synthetic oligonucleotide"
uggucccagauccaagcac

SEQ ID NO: 126 - RNA, 19 nt, Artificial Sequence
  source: /note="Description of Artificial Sequence: Synthetic oligonucleotide"
ucccagauccaagcacaga

SEQ ID NO: 127 - RNA, 19 nt, Artificial Sequence
  source: /note="Description of Artificial Sequence: Synthetic oligonucleotide"
agauccaagcacagaggcu

SEQ ID NO: 128 - RNA, 19 nt, Artificial Sequence
  source: /note="Description of Artificial Sequence: Synthetic oligonucleotide"
gauccaagcacagaggcuu

SEQ ID NO: 129 - RNA, 19 nt, Artificial Sequence
  source: /note="Description of Artificial Sequence: Synthetic oligonucleotide"
auccaagcacagaggcuuc

SEQ ID NO: 130 - RNA, 19 nt, Artificial Sequence
  source: /note="Description of Artificial Sequence: Synthetic oligonucleotide"
cuaccacugucacaggaag

SEQ ID NO: 131 - RNA, 19 nt, Artificial Sequence
  source: /note="Description of Artificial Sequence: Synthetic oligonucleotide"
cugcaaccugacgcaaugu

SEQ ID NO: 132 - RNA, 19 nt, Artificial Sequence
  source: /note="Description of Artificial Sequence: Synthetic oligonucleotide"
ugcaaccugacgcaauguc

SEQ ID NO: 133 - RNA, 19 nt, Artificial Sequence
  source: /note="Description of Artificial Sequence: Synthetic oligonucleotide"
gcaaccugacgcaaugucc

SEQ ID NO: 134 - RNA, 19 nt, Artificial Sequence
  source: /note="Description of Artificial Sequence: Synthetic oligonucleotide"
cugaaaacagcacuggggu

SEQ ID NO: 135 - RNA, 19 nt, Artificial Sequence
  source: /note="Description of Artificial Sequence: Synthetic oligonucleotide"
cagaguuaucgaggcacac

SEQ ID NO: 136 - RNA, 19 nt, Artificial Sequence
  source: /note="Description of Artificial Sequence: Synthetic oligonucleotide"
agaguuaucgaggcacacu

SEQ ID NO: 137 - RNA, 19 nt, Artificial Sequence
  source: /note="Description of Artificial Sequence: Synthetic oligonucleotide"
gaguuaucgaggcacacuc

SEQ ID NO: 138 - RNA, 19 nt, Artificial Sequence
  source: /note="Description of Artificial Sequence: Synthetic oligonucleotide"
aguuaucgaggcacacucu

SEQ ID NO: 139 - RNA, 19 nt, Artificial Sequence
  source: /note="Description of Artificial Sequence: Synthetic oligonucleotide"
guuaucgaggcacacucuc

SEQ ID NO: 140 - RNA, 19 nt, Artificial Sequence
  source: /note="Description of Artificial Sequence: Synthetic oligonucleotide"
uuaucgaggcacacucucc

SEQ ID NO: 141 - RNA, 19 nt, Artificial Sequence
  source: /note="Description of Artificial Sequence: Synthetic oligonucleotide"
uaucgaggcacacucucca

SEQ ID NO: 142 - RNA, 19 nt, Artificial Sequence
  source: /note="Description of Artificial Sequence: Synthetic oligonucleotide"
aucgaggcacacucuccac

SEQ ID NO: 143 - RNA, 19 nt, Artificial Sequence
  source: /note="Description of Artificial Sequence: Synthetic oligonucleotide"
ggcacacucuccaccacua

SEQ ID NO: 144 - RNA, 19 nt, Artificial Sequence
  source: /note="Description of Artificial Sequence: Synthetic oligonucleotide"
ucuccaccacuaucacagg

SEQ ID NO: 145 - RNA, 19 nt, Artificial Sequence
  source: /note="Description of Artificial Sequence: Synthetic oligonucleotide"
gucuaugacaccacauugg

SEQ ID NO: 146 - RNA, 19 nt, Artificial Sequence
  source: /note="Description of Artificial Sequence: Synthetic oligonucleotide"
uaugacaccacauuggcau

SEQ ID NO: 147 - RNA, 19 nt, Artificial Sequence
  source: /note="Description of Artificial Sequence: Synthetic oligonucleotide"
acaccacauuggcaucgga

SEQ ID NO: 148 - RNA, 19 nt, Artificial Sequence
  source: /note="Description of Artificial Sequence: Synthetic oligonucleotide"
caccacauuggcaucggag

SEQ ID NO: 149 - RNA, 19 nt, Artificial Sequence
  source: /note="Description of Artificial Sequence: Synthetic oligonucleotide"
accacauuggcaucggagg

SEQ ID NO: 150 - RNA, 19 nt, Artificial Sequence
  source: /note="Description of Artificial Sequence: Synthetic oligonucleotide"
ccacauuggcaucggagga

SEQ ID NO: 151 - RNA, 19 nt, Artificial Sequence
  source: /note="Description of Artificial Sequence: Synthetic oligonucleotide"
cacauuggcaucggaggau

SEQ ID NO: 152 - RNA, 19 nt, Artificial Sequence
  source: /note="Description of Artificial Sequence: Synthetic oligonucleotide"
acauuggcaucggaggauc

SEQ ID NO: 153 - RNA, 19 nt, Artificial Sequence
  source: /note="Description of Artificial Sequence: Synthetic oligonucleotide"
cauuggcaucggaggaucc

SEQ ID NO: 154 - RNA, 19 nt, Artificial Sequence
  source: /note="Description of Artificial Sequence: Synthetic oligonucleotide"
auuggcaucggaggauccc

SEQ ID NO: 155 - RNA, 19 nt, Artificial Sequence
  source: /note="Description of Artificial Sequence: Synthetic oligonucleotide"
ggcaucggaggaucccauu

SEQ ID NO: 156 - RNA, 19 nt, Artificial Sequence
  source: /note="Description of Artificial Sequence: Synthetic oligonucleotide"
cugcaaccugacacgaugu

SEQ ID NO: 157 - RNA, 19 nt, Artificial Sequence
  source: /note="Description of Artificial Sequence: Synthetic oligonucleotide"
ugcaaccugacacgauguc

SEQ ID NO: 158 - RNA, 19 nt, Artificial Sequence
  source: /note="Description of Artificial Sequence: Synthetic oligonucleotide"
gcaaccugacacgaugucc

SEQ ID NO: 159 - RNA, 19 nt, Artificial Sequence
  source: /note="Description of Artificial Sequence: Synthetic oligonucleotide"
caaccugacacgaugucca

SEQ ID NO: 160 - RNA, 19 nt, Artificial Sequence
  source: /note="Description of Artificial Sequence: Synthetic oligonucleotide"
aaccugacacgauguccag

SEQ ID NO: 161 - RNA, 19 nt, Artificial Sequence
  source: /note="Description of Artificial Sequence: Synthetic oligonucleotide"
ccugacacgauguccagug

SEQ ID NO: 162 - RNA, 19 nt, Artificial Sequence
  source: /note="Description of Artificial Sequence: Synthetic oligonucleotide"
cugacacgauguccaguga

SEQ ID NO: 163 - RNA, 19 nt, Artificial Sequence
  source: /note="Description of Artificial Sequence: Synthetic oligonucleotide"
ugacacgauguccagugac

SEQ ID NO: 164 - RNA, 19 nt, Artificial Sequence
  source: /note="Description of Artificial Sequence: Synthetic oligonucleotide"
gacacgauguccagugaca

SEQ ID NO: 165 - RNA, 19 nt, Artificial Sequence
  source: /note="Description of Artificial Sequence: Synthetic oligonucleotide"
acacgauguccagugacag

SEQ ID NO: 166 - RNA, 19 nt, Artificial Sequence
  source: /note="Description of Artificial Sequence: Synthetic oligonucleotide"
cgauguccagugacagaau

SEQ ID NO: 167 - RNA, 19 nt, Artificial Sequence
  source: /note="Description of Artificial Sequence: Synthetic oligonucleotide"
gugauggacggaguuaucg

SEQ ID NO: 168 - RNA, 19 nt, Artificial Sequence
  source: /note="Description of Artificial Sequence: Synthetic oligonucleotide"
ugauggacggaguuaucga

SEQ ID NO: 169 - RNA, 19 nt, Artificial Sequence
  source: /note="Description of Artificial Sequence: Synthetic oligonucleotide"
gauggacggaguuaucgag

SEQ ID NO: 170 - RNA, 19 nt, Artificial Sequence
  source: /note="Description of Artificial Sequence: Synthetic oligonucleotide"
auggacggaguuaucgagg

SEQ ID NO: 171 - RNA, 19 nt, Artificial Sequence
  source: /note="Description of Artificial Sequence: Synthetic oligonucleotide"
uggacggaguuaucgaggc

SEQ ID NO: 172 - RNA, 19 nt, Artificial Sequence
  source: /note="Description of Artificial Sequence: Synthetic oligonucleotide"
ggacggaguuaucgaggca

SEQ ID NO: 173 - RNA, 19 nt, Artificial Sequence
  source: /note="Description of Artificial Sequence: Synthetic oligonucleotide"
gaguuaucgaggcauaucc

SEQ ID NO: 174 - RNA, 19 nt, Artificial Sequence
  source: /note="Description of Artificial Sequence: Synthetic oligonucleotide"
aguuaucgaggcauauccu

SEQ ID NO: 175 - RNA, 19 nt, Artificial Sequence
  source: /note="Description of Artificial Sequence: Synthetic oligonucleotide"
guuaucgaggcauauccuc

SEQ ID NO: 176 - RNA, 19 nt, Artificial Sequence
  source: /note="Description of Artificial Sequence: Synthetic oligonucleotide"
uuaucgaggcauauccucc

SEQ ID NO: 177 - RNA, 19 nt, Artificial Sequence
  source: /note="Description of Artificial Sequence: Synthetic oligonucleotide"
ggaaggaccugucaaucuu

SEQ ID NO: 178 - RNA, 19 nt, Artificial Sequence
  source: /note="Description of Artificial Sequence: Synthetic oligonucleotide"
aaggaccugucaaucuugg

SEQ ID NO: 179 - RNA, 19 nt, Artificial Sequence
  source: /note="Description of Artificial Sequence: Synthetic oligonucleotide"
aggaccugucaaucuuggu

SEQ ID NO: 180 - RNA, 19 nt, Artificial Sequence
  source: /note="Description of Artificial Sequence: Synthetic oligonucleotide"
ggaccugucaaucuugguc

SEQ ID NO: 181 - RNA, 19 nt, Artificial Sequence
  source: /note="Description of Artificial Sequence: Synthetic oligonucleotide"
ggccugaccgagaacuacu

SEQ ID NO: 182 - RNA, 19 nt, Artificial Sequence
  source: /note="Description of Artificial Sequence: Synthetic oligonucleotide"
ccugaccgagaacuacugc

SEQ ID NO: 183 - RNA, 19 nt, Artificial Sequence
  source: /note="Description of Artificial Sequence: Synthetic oligonucleotide"
cugaccgagaacuacugca

SEQ ID NO: 184 - RNA, 19 nt, Artificial Sequence
  source: /note="Description of Artificial Sequence: Synthetic oligonucleotide"
ugaccgagaacuacugcag

SEQ ID NO: 185 - RNA, 19 nt, Artificial Sequence
  source: /note="Description of Artificial Sequence: Synthetic oligonucleotide"
ggaauccagauucugggaa

SEQ ID NO: 186 - RNA, 19 nt, Artificial Sequence
  source: /note="Description of Artificial Sequence: Synthetic oligonucleotide"
aauccagauucugggaaac

SEQ ID NO: 187 - RNA, 19 nt, Artificial Sequence
  source: /note="Description of Artificial Sequence: Synthetic oligonucleotide"
ucugggaaacaacccuggu

SEQ ID NO: 188 - RNA, 19 nt, Artificial Sequence
  source: /note="Description of Artificial Sequence: Synthetic oligonucleotide"
cugggaaacaacccuggug

SEQ ID NO: 189 - RNA, 19 nt, Artificial Sequence
  source: /note="Description of Artificial Sequence: Synthetic oligonucleotide"
gggaaacaacccugguguu

SEQ ID NO: 190 - RNA, 19 nt, Artificial Sequence
  source: /note="Description of Artificial Sequence: Synthetic oligonucleotide"
gaaacaacccugguguuac

SEQ ID NO: 191 - RNA, 19 nt, Artificial Sequence
  source: /note="Description of Artificial Sequence: Synthetic oligonucleotide"
aaacaacccugguguuaca

SEQ ID NO: 192 - RNA, 19 nt, Artificial Sequence
  source: /note="Description of Artificial Sequence: Synthetic oligonucleotide"
aacaacccugguguuacac

SEQ ID NO: 193 - RNA, 19 nt, Artificial Sequence
  source: /note="Description of Artificial Sequence: Synthetic oligonucleotide"
acaacccugguguuacaca

SEQ ID NO: 194 - RNA, 19 nt, Artificial Sequence
  source: /note="Description of Artificial Sequence: Synthetic oligonucleotide"
caacccugguguuacacaa

SEQ ID NO: 195 - RNA, 19 nt, Artificial Sequence
  source: /note="Description of Artificial Sequence: Synthetic oligonucleotide"
aacccugguguuacacaac

SEQ ID NO: 196 - RNA, 19 nt, Artificial Sequence
  source: /note="Description of Artificial Sequence: Synthetic oligonucleotide"
cgugugugaggugggagua

SEQ ID NO: 197 - RNA, 19 nt, Artificial Sequence
  source: /note="Description of Artificial Sequence: Synthetic oligonucleotide"
gaguacugcaaucugacac

SEQ ID NO: 198 - RNA, 19 nt, Artificial Sequence
  source: /note="Description of Artificial Sequence: Synthetic oligonucleotide"
ugcaaucugacacaaugcu

SEQ ID NO: 199 - RNA, 19 nt, Artificial Sequence
  source: /note="Description of Artificial Sequence: Synthetic oligonucleotide"
gcaaucugacacaaugcuc

SEQ ID NO: 200 - RNA, 19 nt, Artificial Sequence
  source: /note="Description of Artificial Sequence: Synthetic oligonucleotide"
caaucugacacaaugcuca

SEQ ID NO: 201 - RNA, 19 nt, Artificial Sequence
  source: /note="Description of Artificial Sequence: Synthetic oligonucleotide"
cucccacuguuguuccagu

SEQ ID NO: 202 - RNA, 19 nt, Artificial Sequence
  source: /note="Description of Artificial Sequence: Synthetic oligonucleotide"
ucccacuguuguuccaguu

SEQ ID NO: 203 - RNA, 19 nt, Artificial Sequence
  source: /note="Description of Artificial Sequence: Synthetic oligonucleotide"
ccacuguuguuccaguucc

SEQ ID NO: 204 - RNA, 19 nt, Artificial Sequence
  source: /note="Description of Artificial Sequence: Synthetic oligonucleotide"
cacuguuguuccaguucca

SEQ ID NO: 205 - RNA, 19 nt, Artificial Sequence
  source: /note="Description of Artificial Sequence: Synthetic oligonucleotide"
guuguuccaguuccaagca

SEQ ID NO: 206 - RNA, 19 nt, Artificial Sequence
  source: /note="Description of Artificial Sequence: Synthetic oligonucleotide"
uguuccaguuccaagcaug

SEQ ID NO: 207 - RNA, 19 nt, Artificial Sequence
  source: /note="Description of Artificial Sequence: Synthetic oligonucleotide"
guuccaguuccaagcaugg

SEQ ID NO: 208 - RNA, 19 nt, Artificial Sequence
  source: /note="Description of Artificial Sequence: Synthetic oligonucleotide"
cauggaggcucauucugaa

SEQ ID NO: 209 - RNA, 19 nt, Artificial Sequence
  source: /note="Description of Artificial Sequence: Synthetic oligonucleotide"
auggaggcucauucugaag

SEQ ID NO: 210 - RNA, 19 nt, Artificial Sequence
  source: /note="Description of Artificial Sequence: Synthetic oligonucleotide"
ggaggcucauucugaagca

SEQ ID NO: 211 - RNA, 19 nt, Artificial Sequence
  source: /note="Description of Artificial Sequence: Synthetic oligonucleotide"
cauucugaagcagcaccaa

SEQ ID NO: 212 - RNA, 19 nt, Artificial Sequence
  source: /note="Description of Artificial Sequence: Synthetic oligonucleotide"
gaagcagcaccaacugagc

SEQ ID NO: 213 - RNA, 19 nt, Artificial Sequence
  source: /note="Description of Artificial Sequence: Synthetic oligonucleotide"
gcagcaccaacugagcaaa

SEQ ID NO: 214 - RNA, 19 nt, Artificial Sequence
  source: /note="Description of Artificial Sequence: Synthetic oligonucleotide"
cggcagugcuaccauggua

SEQ ID NO: 215 - RNA, 19 nt, Artificial Sequence
  source: /note="Description of Artificial Sequence: Synthetic oligonucleotide"
cagugcuaccaugguaaug

SEQ ID NO: 216 - RNA, 19 nt, Artificial Sequence
  source: /note="Description of Artificial Sequence: Synthetic oligonucleotide"
gugcuaccaugguaauggc

SEQ ID NO: 217 - RNA, 19 nt, Artificial Sequence
  source: /note="Description of Artificial Sequence: Synthetic oligonucleotide"
caugguaauggccagaguu

SEQ ID NO: 218 - RNA, 19 nt, Artificial Sequence
  source: /note="Description of Artificial Sequence: Synthetic oligonucleotide"
gguaauggccagaguuauc

SEQ ID NO: 219 - RNA, 19 nt, Artificial Sequence
  source: /note="Description of Artificial Sequence: Synthetic oligonucleotide"
guaauggccagaguuaucg

SEQ ID NO: 220 - RNA, 19 nt, Artificial Sequence
  source: /note="Description of Artificial Sequence: Synthetic oligonucleotide"
uaauggccagaguuaucga

SEQ ID NO: 221 - RNA, 19 nt, Artificial Sequence
  source: /note="Description of Artificial Sequence: Synthetic oligonucleotide"
uggccagaguuaucgaggc

SEQ ID NO: 222 - RNA, 19 nt, Artificial Sequence
  source: /note="Description of Artificial Sequence: Synthetic oligonucleotide"
ggccagaguuaucgaggca

SEQ ID NO: 223 - RNA, 19 nt, Artificial Sequence
  source: /note="Description of Artificial Sequence: Synthetic oligonucleotide"
gccagaguuaucgaggcac

SEQ ID NO: 224 - RNA, 19 nt, Artificial Sequence
  source: /note="Description of Artificial Sequence: Synthetic oligonucleotide"
ccagaguuaucgaggcaca

SEQ ID NO: 225 - RNA, 19 nt, Artificial Sequence
  source: /note="Description of Artificial Sequence: Synthetic oligonucleotide"
agaguuaucgaggcacauu

SEQ ID NO: 226 - RNA, 19 nt, Artificial Sequence
  source: /note="Description of Artificial Sequence: Synthetic oligonucleotide"
gaguuaucgaggcacauuc

SEQ ID NO: 227 - RNA, 19 nt, Artificial Sequence
  source: /note="Description of Artificial Sequence: Synthetic oligonucleotide"
aguuaucgaggcacauucu

SEQ ID NO: 228 - RNA, 19 nt, Artificial Sequence
  source: /note="Description of Artificial Sequence: Synthetic oligonucleotide"
gcacauucuccaccacugu

SEQ ID NO: 229 - RNA, 19 nt, Artificial Sequence
  source: /note="Description of Artificial Sequence: Synthetic oligonucleotide"
auucuccaccacugucaca

SEQ ID NO: 230 - RNA, 19 nt, Artificial Sequence
  source: /note="Description of Artificial Sequence: Synthetic oligonucleotide"
cacaggaaggacaugucaa

SEQ ID NO: 231 - RNA, 19 nt, Artificial Sequence
  source: /note="Description of Artificial Sequence: Synthetic oligonucleotide"
gaaggacaugucaaucuug

SEQ ID NO: 232 - RNA, 19 nt, Artificial Sequence
  source: /note="Description of Artificial Sequence: Synthetic oligonucleotide"
uuuaccauggaccccagca

SEQ ID NO: 233 - RNA, 19 nt, Artificial Sequence
  source: /note="Description of Artificial Sequence: Synthetic oligonucleotide"
uuaccauggaccccagcau

SEQ ID NO: 234 - RNA, 19 nt, Artificial Sequence
  source: /note="Description of Artificial Sequence: Synthetic oligonucleotide"
acugcaaccugacgcgaug

SEQ ID NO: 235 - RNA, 19 nt, Artificial Sequence
  source: /note="Description of Artificial Sequence: Synthetic oligonucleotide"
accugacgcgaugcucaga

SEQ ID NO: 236 - RNA, 19 nt, Artificial Sequence
  source: /note="Description of Artificial Sequence: Synthetic oligonucleotide"
ugacgcgaugcucagacac

SEQ ID NO: 237 - RNA, 19 nt, Artificial Sequence
  source: /note="Description of Artificial Sequence: Synthetic oligonucleotide"
gacgcgaugcucagacaca

SEQ ID NO: 238 - RNA, 19 nt, Artificial Sequence
  source: /note="Description of Artificial Sequence: Synthetic oligonucleotide"
acgcgaugcucagacacag

SEQ ID NO: 239 - RNA, 19 nt, Artificial Sequence
  source: /note="Description of Artificial Sequence: Synthetic oligonucleotide"
cgcgaugcucagacacaga

SEQ ID NO: 240 - RNA, 19 nt, Artificial Sequence
  source: /note="Description of Artificial Sequence: Synthetic oligonucleotide"
gaagugaaccucgaaucuc

SEQ ID NO: 241 - RNA, 19 nt, Artificial Sequence
  source: /note="Description of Artificial Sequence: Synthetic oligonucleotide"
caggacugaauguuacauc

SEQ ID NO: 242 - RNA, 19 nt, Artificial Sequence
  source: /note="Description of Artificial Sequence: Synthetic oligonucleotide"
acccaagguaccuuuggga

SEQ ID NO: 243 - RNA, 19 nt, Artificial Sequence
  source: /note="Description of Artificial Sequence: Synthetic oligonucleotide"
cccaagguaccuuugggac

SEQ ID NO: 244 - RNA, 19 nt, Artificial Sequence
  source: /note="Description of Artificial Sequence: Synthetic oligonucleotide"
uaccuuugggacuggccuu

SEQ ID NO: 245 - RNA, 19 nt, Artificial Sequence
  source: /note="Description of Artificial Sequence: Synthetic oligonucleotide"
accuuugggacuggccuuc

SEQ ID NO: 246 - RNA, 19 nt, Artificial Sequence
  source: /note="Description of Artificial Sequence: Synthetic oligonucleotide"
gacagcaaucaaacgaaga

SEQ ID NO: 247 - RNA, 19 nt, Artificial Sequence
  source: /note="Description of Artificial Sequence: Synthetic oligonucleotide"
acagcaaucaaacgaagac

SEQ ID NO: 248 - RNA, 19 nt, Artificial Sequence
  source: /note="Description of Artificial Sequence: Synthetic oligonucleotide"
cagcaaucaaacgaagaca

SEQ ID NO: 249 - RNA, 19 nt, Artificial Sequence
  source: /note="Description of Artificial Sequence: Synthetic oligonucleotide"
agcaaucaaacgaagacac

SEQ ID NO: 250 - RNA, 19 nt, Artificial Sequence
  source: /note="Description of Artificial Sequence: Synthetic oligonucleotide"
gcaaucaaacgaagacacu

SEQ ID NO: 251 - RNA, 19 nt, Artificial Sequence
  source: /note="Description of Artificial Sequence: Synthetic oligonucleotide"
caaucaaacgaagacacug

SEQ ID NO: 252 - RNA, 19 nt, Artificial Sequence
  source: /note="Description of Artificial Sequence: Synthetic oligonucleotide"
aucaaacgaagacacuguu

SEQ ID NO: 253 - RNA, 19 nt, Artificial Sequence
  source: /note="Description of Artificial Sequence: Synthetic oligonucleotide"
ucaaacgaagacacuguuc

SEQ ID NO: 254 - RNA, 19 nt, Artificial Sequence
  source: /note="Description of Artificial Sequence: Synthetic oligonucleotide"
caaacgaagacacuguucc

SEQ ID NO: 255 - RNA, 19 nt, Artificial Sequence
  source: /note="Description of Artificial Sequence: Synthetic oligonucleotide"
aaacgaagacacuguuccc

SEQ ID NO: 256 - RNA, 19 nt, Artificial Sequence
  source: /note="Description of Artificial Sequence: Synthetic oligonucleotide"
aacgaagacacuguuccca

SEQ ID NO: 257 - RNA, 19 nt, Artificial Sequence
  source: /note="Description of Artificial Sequence: Synthetic oligonucleotide"
acgaagacacuguucccag

SEQ ID NO: 258 - RNA, 19 nt, Artificial Sequence
  source: /note="Description of Artificial Sequence: Synthetic oligonucleotide"
cgaagacacuguucccagc

SEQ ID NO: 259 - RNA, 19 nt, Artificial Sequence
  source: /note="Description of Artificial Sequence: Synthetic oligonucleotide"
gaagacacuguucccagcu

SEQ ID NO: 260 - RNA, 19 nt, Artificial Sequence
  source: /note="Description of Artificial Sequence: Synthetic oligonucleotide"
aagacacuguucccagcua

SEQ ID NO: 261 - RNA, 19 nt, Artificial Sequence
  source: /note="Description of Artificial Sequence: Synthetic oligonucleotide"
agacacuguucccagcuac

SEQ ID NO: 262 - RNA, 19 nt, Artificial Sequence
  source: /note="Description of Artificial Sequence: Synthetic oligonucleotide"
gacacuguucccagcuacc

SEQ ID NO: 263 - RNA, 19 nt, Artificial Sequence
  source: /note="Description of Artificial Sequence: Synthetic oligonucleotide"
acacuguucccagcuacca

SEQ ID NO: 264 - RNA, 19 nt, Artificial Sequence
  source: /note="Description of Artificial Sequence: Synthetic oligonucleotide"
ccagcuaccagcuaugcca

SEQ ID NO: 265 - RNA, 19 nt, Artificial Sequence
  source: /note="Description of Artificial Sequence: Synthetic oligonucleotide"
cagcuaccagcuaugccaa

SEQ ID NO: 266 - RNA, 19 nt, Artificial Sequence
  source: /note="Description of Artificial Sequence: Synthetic oligonucleotide"
agcuaccagcuaugccaaa

SEQ ID NO: 267 - RNA, 19 nt, Artificial Sequence
  source: /note="Description of Artificial Sequence: Synthetic oligonucleotide"
gcuaccagcuaugccaaac

SEQ ID NO: 268 - RNA, 19 nt, Artificial Sequence
  source: /note="Description of Artificial Sequence: Synthetic oligonucleotide"
cuaccagcuaugccaaacc

SEQ ID NO: 269 - RNA, 19 nt, Artificial Sequence
  source: /note="Description of Artificial Sequence: Synthetic oligonucleotide"
uaccagcuaugccaaaccu

SEQ ID NO: 270 - RNA, 19 nt, Artificial Sequence
  source: /note="Description of Artificial Sequence: Synthetic oligonucleotide"
gcauuuuugguauuuuugu

SEQ ID NO: 271 - RNA, 19 nt, Artificial Sequence
  source: /note="Description of Artificial Sequence: Synthetic oligonucleotide"
cauuuuugguauuuuugug

SEQ ID NO: 272 - RNA, 19 nt, Artificial Sequence
  source: /note="Description of Artificial Sequence: Synthetic oligonucleotide"
auuuuugguauuuuugugu

SEQ ID NO: 273 - RNA, 19 nt, Artificial Sequence
  source: /note="Description of Artificial Sequence: Synthetic oligonucleotide"
uuuuugguauuuuugugua

SEQ ID NO: 274 - RNA, 19 nt, Artificial Sequence
  source: /note="Description of Artificial Sequence: Synthetic oligonucleotide"
uuuugguauuuuuguguau

SEQ ID NO: 275 - RNA, 19 nt, Artificial Sequence
  source: /note="Description of Artificial Sequence: Synthetic oligonucleotide"
uuugguauuuuuguguaua

SEQ ID NO: 276 - RNA, 19 nt, Artificial Sequence
  source: /note="Description of Artificial Sequence: Synthetic oligonucleotide"
uugguauuuuuguguauaa

SEQ ID NO: 277 - RNA, 19 nt, Artificial Sequence
  source: /note="Description of Artificial Sequence: Synthetic oligonucleotide"
ugguauuuuuguguauaag

SEQ ID NO: 278 - RNA, 19 nt, Artificial Sequence
  source: /note="Description of Artificial Sequence: Synthetic oligonucleotide"
gguauuuuuguguauaagc

SEQ ID NO: 279 - RNA, 19 nt, Artificial Sequence
  source: /note="Description of Artificial Sequence: Synthetic oligonucleotide"
guauuuuuguguauaagcu

SEQ ID NO: 280 - RNA, 19 nt, Artificial Sequence
  source: /note="Description of Artificial Sequence: Synthetic oligonucleotide"
uauuuuuguguauaagcuu

SEQ ID NO: 281 - RNA, 19 nt, Artificial Sequence
  source: /note="Description of Artificial Sequence: Synthetic oligonucleotide"
auuuuuguguauaagcuuu

SEQ ID NO: 282 - RNA, 19 nt, Artificial Sequence
  source: /note="Description of Artificial Sequence: Synthetic oligonucleotide"
uuuuuguguauaagcuuuu

SEQ ID NO: 283 - RNA, 19 nt, Artificial Sequence
  source: /note="Description of Artificial Sequence: Synthetic oligonucleotide"
uguuaaaaauaaacucugc

SEQ ID NO: 284 - RNA, 19 nt, Artificial Sequence
  source: /note="Description of Artificial Sequence: Synthetic oligonucleotide"
guuaaaaauaaacucugca

SEQ ID NO: 285 - RNA, 19 nt, Artificial Sequence
  source: /note="Description of Artificial Sequence: Synthetic oligonucleotide"
uuaaaaauaaacucugcac

SEQ ID NO: 286 - RNA, 19 nt, Artificial Sequence
  source: /note="Description of Artificial Sequence: Synthetic oligonucleotide"
uaaaaauaaacucugcacu

SEQ ID NO: 287 - RNA, 19 nt, Artificial Sequence
  source: /note="Description of Artificial Sequence: Synthetic oligonucleotide"
aaaaauaaacucugcacuu

SEQ ID NO: 288 - RNA, 19 nt, Artificial Sequence
  source: /note="Description of Artificial Sequence: Synthetic oligonucleotide"
aaaauaaacucugcacuua

SEQ ID NO: 289 - RNA, 19 nt, Artificial Sequence
  source: /note="Description of Artificial Sequence: Synthetic oligonucleotide"
aaauaaacucugcacuuau

SEQ ID NO: 290 - RNA, 19 nt, Artificial Sequence
  source: /note="Description of Artificial Sequence: Synthetic oligonucleotide"
aauaaacucugcacuuauu

SEQ ID NO: 291 - RNA, 19 nt, Artificial Sequence
  source: /note="Description of Artificial Sequence: Synthetic oligonucleotide"
auaaacucugcacuuauuu

SEQ ID NO: 292 - RNA, 19 nt, Artificial Sequence
  source: /note="Description of Artificial Sequence: Synthetic oligonucleotide"
uaaacucugcacuuauuuu

SEQ ID NO: 293 - RNA, 19 nt, Artificial Sequence
  source: /note="Description of Artificial Sequence: Synthetic oligonucleotide"
aaacucugcacuuauuuug

SEQ ID NO: 294 - RNA, 19 nt, Artificial Sequence
  source: /note="Description of Artificial Sequence: Synthetic oligonucleotide"
aacucugcacuuauuuuga

SEQ ID NO: 295 - RNA, 19 nt, Artificial Sequence
  source: /note="Description of Artificial Sequence: Synthetic oligonucleotide"
acucugcacuuauuuugau

SEQ ID NO: 296 - RNA, 19 nt, Artificial Sequence
  source: /note="Description of Artificial Sequence: Synthetic oligonucleotide"
cucugcacuuauuuugauu

SEQ ID NO: 297 - RNA, 19 nt, Artificial Sequence
  source: /note="Description of Artificial Sequence: Synthetic oligonucleotide"
ucugcacuuauuuugauuu

SEQ ID NO: 298 - RNA, 19 nt, Artificial Sequence
  source: /note="Description of Artificial Sequence: Synthetic oligonucleotide"
cugcacuuauuuugauuug

SEQ ID NO: 299 - RNA, 19 nt, Artificial Sequence
  source: /note="Description of Artificial Sequence: Synthetic oligonucleotide"
ugcacuuauuuugauuuga

SEQ ID NO: 300 - RNA, 19 nt, Artificial Sequence
  source: /note="Description of Artificial Sequence: Synthetic oligonucleotide"
gaaagccagccccaaaggu

SEQ ID NO: 301 - RNA, 19 nt, Artificial Sequence
  source: /note="Description of Artificial Sequence: Synthetic oligonucleotide"
caauccuggaccacauggc

SEQ ID NO: 302 - RNA, 19 nt, Artificial Sequence
  source: /note="Description of Artificial Sequence: Synthetic oligonucleotide"
cgugccucgauaacucugu

SEQ ID NO: 303 - RNA, 19 nt, Artificial Sequence
  source: /note="Description of Artificial Sequence: Synthetic oligonucleotide"
acgugccucgauaacucug

SEQ ID NO: 304 - RNA, 19 nt, Artificial Sequence
  source: /note="Description of Artificial Sequence: Synthetic oligonucleotide"
uacgugccucgauaacucu

SEQ ID NO: 305 - RNA, 19 nt, Artificial Sequence
  source: /note="Description of Artificial Sequence: Synthetic oligonucleotide"
guacgugccucgauaacuc

SEQ ID NO: 306 - RNA, 19 nt, Artificial Sequence
  source: /note="Description of Artificial Sequence: Synthetic oligonucleotide"
aguacgugccucgauaacu

SEQ ID NO: 307 - RNA, 19 nt, Artificial Sequence
  source: /note="Description of Artificial Sequence: Synthetic oligonucleotide"
cugugacagugguggagua

SEQ ID NO: 308 - RNA, 19 nt, Artificial Sequence
  source: /note="Description of Artificial Sequence: Synthetic oligonucleotide"
uccugugacagugguggag

SEQ ID NO: 309 - RNA, 19 nt, Artificial Sequence
  source: /note="Description of Artificial Sequence: Synthetic oligonucleotide"
accaagcuuggcagguccu

SEQ ID NO: 310 - RNA, 19 nt, Artificial Sequence
  source: /note="Description of Artificial Sequence: Synthetic oligonucleotide"
ugaccaagcuuggcagguc

SEQ ID NO: 311 - RNA, 19 nt, Artificial Sequence
  source: /note="Description of Artificial Sequence: Synthetic oligonucleotide"
augaccaagcuuggcaggu

SEQ ID NO: 312 - RNA, 19 nt, Artificial Sequence
  source: /note="Description of Artificial Sequence: Synthetic oligonucleotide"
gaugaccaagcuuggcagg

SEQ ID NO: 313 - RNA, 19 nt, Artificial Sequence
  source: /note="Description of Artificial Sequence: Synthetic oligonucleotide"
auagaugaccaagcuuggc

SEQ ID NO: 314 - RNA, 19 nt, Artificial Sequence
  source: /note="Description of Artificial Sequence: Synthetic oligonucleotide"
cauagaugaccaagcuugg

SEQ ID NO: 315 - RNA, 19 nt, Artificial Sequence
  source: /note="Description of Artificial Sequence: Synthetic oligonucleotide"
uuucugugguccuauuaug

SEQ ID NO: 316 - RNA, 19 nt, Artificial Sequence
  source: /note="Description of Artificial Sequence: Synthetic oligonucleotide"
guuuucugugguccuauua

SEQ ID NO: 317 - RNA, 19 nt, Artificial Sequence
  source: /note="Description of Artificial Sequence: Synthetic oligonucleotide"
aguuuucugugguccuauu

SEQ ID NO: 318 - RNA, 19 nt, Artificial Sequence
  source: /note="Description of Artificial Sequence: Synthetic oligonucleotide"
uaguuuucugugguccuau

SEQ ID NO: 319 - RNA, 19 nt, Artificial Sequence
  source: /note="Description of Artificial Sequence: Synthetic oligonucleotide"
guaguuuucugugguccua

SEQ ID NO: 320 - RNA, 19 nt, Artificial Sequence
  source: /note="Description of Artificial Sequence: Synthetic oligonucleotide"
caugaucaagccagcauuu

SEQ ID NO: 321 - RNA, 19 nt, Artificial Sequence
  source: /note="Description of Artificial Sequence: Synthetic oligonucleotide"
guaguucaugaucaagcca

SEQ ID NO: 322 - RNA, 19 nt, Artificial Sequence
  source: /note="Description of Artificial Sequence: Synthetic oligonucleotide"
aguaguucaugaucaagcc

SEQ ID NO: 323 - RNA, 19 nt, Artificial Sequence
  source: /note="Description of Artificial Sequence: Synthetic oligonucleotide"
cguauaacaauaaggagcu

SEQ ID NO: 324 - RNA, 19 nt, Artificial Sequence
  source: /note="Description of Artificial Sequence: Synthetic oligonucleotide"
ucguauaacaauaaggagc

SEQ ID NO: 325 - RNA, 19 nt, Artificial Sequence
  source: /note="Description of Artificial Sequence: Synthetic oligonucleotide"
ugcgucagguugcaguacu

SEQ ID NO: 326 - RNA, 19 nt, Artificial Sequence
  source: /note="Description of Artificial Sequence: Synthetic oligonucleotide"
uugcgucagguugcaguac

SEQ ID NO: 327 - RNA, 19 nt, Artificial Sequence
  source: /note="Description of Artificial Sequence: Synthetic oligonucleotide"
auugcgucagguugcagua

SEQ ID NO: 328 - RNA, 19 nt, Artificial Sequence
  source: /note="Description of Artificial Sequence: Synthetic oligonucleotide"
agcauugcgucagguugca

SEQ ID NO: 329 - RNA, 19 nt, Artificial Sequence
  source: /note="Description of Artificial Sequence: Synthetic oligonucleotide"
gagcauugcgucagguugc

SEQ ID NO: 330 - RNA, 19 nt, Artificial Sequence
  source: /note="Description of Artificial Sequence: Synthetic oligonucleotide"
ugagcauugcgucagguug

SEQ ID NO: 331 - RNA, 19 nt, Artificial Sequence
  source: /note="Description of Artificial Sequence: Synthetic oligonucleotide"
cugagcauugcgucagguu

SEQ ID NO: 332 - RNA, 19 nt, Artificial Sequence
  source: /note="Description of Artificial Sequence: Synthetic oligonucleotide"
ucugagcauugcgucaggu

SEQ ID NO: 333 - RNA, 19 nt, Artificial Sequence
  source: /note="Description of Artificial Sequence: Synthetic oligonucleotide"
gucugagcauugcgucagg

SEQ ID NO: 334 - RNA, 19 nt, Artificial Sequence
  source: /note="Description of Artificial Sequence: Synthetic oligonucleotide"
cgucugagcauugcgucag

SEQ ID NO: 335 - RNA, 19 nt, Artificial Sequence
  source: /note="Description of Artificial Sequence: Synthetic oligonucleotide"
gcgucugagcauugcguca

SEQ ID NO: 336 - RNA, 19 nt, Artificial Sequence
  source: /note="Description of Artificial Sequence: Synthetic oligonucleotide"
aaccgggguaacagucgga

SEQ ID NO: 337 - RNA, 19 nt, Artificial Sequence
  source: /note="Description of Artificial Sequence: Synthetic oligonucleotide"
uuggaaccgggguaacagu

SEQ ID NO: 338 - RNA, 19 nt, Artificial Sequence
  source: /note="Description of Artificial Sequence: Synthetic oligonucleotide"
cuuggaaccgggguaacag

SEQ ID NO: 339 - RNA, 19 nt, Artificial Sequence
  source: /note="Description of Artificial Sequence: Synthetic oligonucleotide"
gcuuggaaccgggguaaca

SEQ ID NO: 340 - RNA, 19 nt, Artificial Sequence
  source: /note="Description of Artificial Sequence: Synthetic oligonucleotide"
aggcuuggaaccgggguaa

SEQ ID NO: 341 - RNA, 19 nt, Artificial Sequence
  source: /note="Description of Artificial Sequence: Synthetic oligonucleotide"
uaggcuuggaaccggggua

SEQ ID NO: 342 - RNA, 19 nt, Artificial Sequence
  source: /note="Description of Artificial Sequence: Synthetic oligonucleotide"
agccucuaggcuuggaacc

SEQ ID NO: 343 - RNA, 19 nt, Artificial Sequence
  source: /note="Description of Artificial Sequence: Synthetic oligonucleotide"
gagccucuaggcuuggaac

SEQ ID NO: 344 - RNA, 19 nt, Artificial Sequence
  source: /note="Description of Artificial Sequence: Synthetic oligonucleotide"
uucggaaggagccucuagg

SEQ ID NO: 345 - RNA, 19 nt, Artificial Sequence
  source: /note="Description of Artificial Sequence: Synthetic oligonucleotide"
guucggaaggagccucuag

SEQ ID NO: 346 - RNA, 19 nt, Artificial Sequence
  source: /note="Description of Artificial Sequence: Synthetic oligonucleotide"
ugcuuguucggaaggagcc

SEQ ID NO: 347 - RNA, 19 nt, Artificial Sequence
  source: /note="Description of Artificial Sequence: Synthetic oligonucleotide"
ucggugcuuguucggaagg

SEQ ID NO: 348 - RNA, 19 nt, Artificial Sequence
  source: /note="Description of Artificial Sequence: Synthetic oligonucleotide"
gucggugcuuguucggaag

SEQ ID NO: 349 - RNA, 19 nt, Artificial Sequence
  source: /note="Description of Artificial Sequence: Synthetic oligonucleotide"
agucggugcuuguucggaa

SEQ ID NO: 350 - RNA, 19 nt, Artificial Sequence
  source: /note="Description of Artificial Sequence: Synthetic oligonucleotide"
cagucggugcuuguucgga

SEQ ID NO: 351 - RNA, 19 nt, Artificial Sequence
  source: /note="Description of Artificial Sequence: Synthetic oligonucleotide"
ucagucggugcuuguucgg

SEQ ID NO: 352 - RNA, 19 nt, Artificial Sequence
  source: /note="Description of Artificial Sequence: Synthetic oligonucleotide"
gcucagucggugcuuguuc

SEQ ID NO: 353 - RNA, 19 nt, Artificial Sequence
  source: /note="Description of Artificial Sequence: Synthetic oligonucleotide"
ugcucagucggugcuuguu

SEQ ID NO: 354 - RNA, 19 nt, Artificial Sequence
  source: /note="Description of Artificial Sequence: Synthetic oligonucleotide"
uugcucagucggugcuugu

SEQ ID NO: 355 - RNA, 19 nt, Artificial Sequence
  source: /note="Description of Artificial Sequence: Synthetic oligonucleotide"
uuugcucagucggugcuug

SEQ ID NO: 356 - RNA, 19 nt, Artificial Sequence
  source: /note="Description of Artificial Sequence: Synthetic oligonucleotide"
cuuugcucagucggugcuu

SEQ ID NO: 357 - RNA, 19 nt, Artificial Sequence
  source: /note="Description of Artificial Sequence: Synthetic oligonucleotide"
ccuuugcucagucggugcu

SEQ ID NO: 358 - RNA, 19 nt, Artificial Sequence
  source: /note="Description of Artificial Sequence: Synthetic oligonucleotide"
auaacucuguccauuacca

SEQ ID NO: 359 - RNA, 19 nt, Artificial Sequence
  source: /note="Description of Artificial Sequence: Synthetic oligonucleotide"
cgauaacucuguccauuac

SEQ ID NO: 360 - RNA, 19 nt, Artificial Sequence
  source: /note="Description of Artificial Sequence: Synthetic oligonucleotide"
ucgauaacucuguccauua

SEQ ID NO: 361 - RNA, 19 nt, Artificial Sequence
  source: /note="Description of Artificial Sequence: Synthetic oligonucleotide"
uaugugccucgauaacucu

SEQ ID NO: 362 - RNA, 19 nt, Artificial Sequence
  source: /note="Description of Artificial Sequence: Synthetic oligonucleotide"
guaugugccucgauaacuc

SEQ ID NO: 363 - RNA, 19 nt, Artificial Sequence
  source: /note="Description of Artificial Sequence: Synthetic oligonucleotide"
aguaugugccucgauaacu

SEQ ID NO: 364 - RNA, 19 nt, Artificial Sequence
  source: /note="Description of Artificial Sequence: Synthetic oligonucleotide"
gaguaugugccucgauaac

SEQ ID NO: 365 - RNA, 19 nt, Artificial Sequence
  source: /note="Description of Artificial Sequence: Synthetic oligonucleotide"
ggaguaugugccucgauaa

SEQ ID NO: 366 - RNA, 19 nt, Artificial Sequence
  source: /note="Description of Artificial Sequence: Synthetic oligonucleotide"
cagugguggaguaugugcc

SEQ ID NO: 367 - RNA, 19 nt, Artificial Sequence
  source: /note="Description of Artificial Sequence: Synthetic oligonucleotide"
gugacagugguggaguaug

SEQ ID NO: 368 - RNA, 19 nt, Artificial Sequence
  source: /note="Description of Artificial Sequence: Synthetic oligonucleotide"
aagcuuggcagguucuucc

SEQ ID NO: 369 - RNA, 19 nt, Artificial Sequence
  source: /note="Description of Artificial Sequence: Synthetic oligonucleotide"
augcgaguguggugucaua

SEQ ID NO: 370 - RNA, 19 nt, Artificial Sequence
  source: /note="Description of Artificial Sequence: Synthetic oligonucleotide"
uaugcgaguguggugucau

SEQ ID NO: 371 - RNA, 19 nt, Artificial Sequence
  source: /note="Description of Artificial Sequence: Synthetic oligonucleotide"
cuaugcgagugugguguca

SEQ ID NO: 372 - RNA, 19 nt, Artificial Sequence
  source: /note="Description of Artificial Sequence: Synthetic oligonucleotide"
acuaugcgagugugguguc

SEQ ID NO: 373 - RNA, 19 nt, Artificial Sequence
  source: /note="Description of Artificial Sequence: Synthetic oligonucleotide"
gacuaugcgaguguggugu

SEQ ID NO: 374 - RNA, 19 nt, Artificial Sequence
  source: /note="Description of Artificial Sequence: Synthetic oligonucleotide"
ccgacuaugcgaguguggu

SEQ ID NO: 375 - RNA, 19 nt, Artificial Sequence
  source: /note="Description of Artificial Sequence: Synthetic oligonucleotide"
uccgacuaugcgagugugg

SEQ ID NO: 376 - RNA, 19 nt, Artificial Sequence
  source: /note="Description of Artificial Sequence: Synthetic oligonucleotide"
guccgacuaugcgagugug

SEQ ID NO: 377 - RNA, 19 nt, Artificial Sequence
  source: /note="Description of Artificial Sequence: Synthetic oligonucleotide"
gguccgacuaugcgagugu

SEQ ID NO: 378 - RNA, 19 nt, Artificial Sequence
  source: /note="Description of Artificial Sequence: Synthetic oligonucleotide"
auucugggguccgacuaug

SEQ ID NO: 379 - RNA, 19 nt, Artificial Sequence
  source: /note="Description of Artificial Sequence: Synthetic oligonucleotide"
uauucugggguccgacuau

SEQ ID NO: 380 - RNA, 19 nt, Artificial Sequence
  source: /note="Description of Artificial Sequence: Synthetic oligonucleotide"
guauucugggguccgacua

SEQ ID NO: 381 - RNA, 19 nt, Artificial Sequence
  source: /note="Description of Artificial Sequence: Synthetic oligonucleotide"
aguauucugggguccgacu

SEQ ID NO: 382 - RNA, 19 nt, Artificial Sequence
  source: /note="Description of Artificial Sequence: Synthetic oligonucleotide"
uaguauucugggguccgac

SEQ ID NO: 383 - RNA, 19 nt, Artificial Sequence
  source: /note="Description of Artificial Sequence: Synthetic oligonucleotide"
guaguauucugggguccga

SEQ ID NO: 384 - RNA, 19 nt, Artificial Sequence
  source: /note="Description of Artificial Sequence: Synthetic oligonucleotide"
gguaguauucugggguccg

SEQ ID NO: 385 - RNA, 19 nt, Artificial Sequence
  source: /note="Description of Artificial Sequence: Synthetic oligonucleotide"
cugcucagucggugcuugu

SEQ ID NO: 386 - RNA, 19 nt, Artificial Sequence
  source: /note="Description of Artificial Sequence: Synthetic oligonucleotide"
cucugcucagucggugcuu

SEQ ID NO: 387 - RNA, 19 nt, Artificial Sequence
  source: /note="Description of Artificial Sequence: Synthetic oligonucleotide"
aacucuguccauuaccgug

SEQ ID NO: 388 - RNA, 19 nt, Artificial Sequence
  source: /note="Description of Artificial Sequence: Synthetic oligonucleotide"
uaacucuguccauuaccgu

SEQ ID NO: 389 - RNA, 19 nt, Artificial Sequence
  source: /note="Description of Artificial Sequence: Synthetic oligonucleotide"
auaacucuguccauuaccg

SEQ ID NO: 390 - RNA, 19 nt, Artificial Sequence
  source: /note="Description of Artificial Sequence: Synthetic oligonucleotide"
aggcuuggaaucgggguaa

SEQ ID NO: 391 - RNA, 19 nt, Artificial Sequence
  source: /note="Description of Artificial Sequence: Synthetic oligonucleotide"
uaggcuuggaaucggggua

SEQ ID NO: 392 - RNA, 19 nt, Artificial Sequence
  source: /note="Description of Artificial Sequence: Synthetic oligonucleotide"
cuaggcuuggaaucggggu

SEQ ID NO: 393 - RNA, 19 nt, Artificial Sequence
  source: /note="Description of Artificial Sequence: Synthetic oligonucleotide"
ucuaggcuuggaaucgggg

SEQ ID NO: 394 - RNA, 19 nt, Artificial Sequence
  source: /note="Description of Artificial Sequence: Synthetic oligonucleotide"
cucuaggcuuggaaucggg

SEQ ID NO: 395 - RNA, 19 nt, Artificial Sequence
  source: /note="Description of Artificial Sequence: Synthetic oligonucleotide"
ccucuaggcuuggaaucgg

SEQ ID NO: 396 - RNA, 19 nt, Artificial Sequence
  source: /note="Description of Artificial Sequence: Synthetic oligonucleotide"
gccucuaggcuuggaaucg

SEQ ID NO: 397 - RNA, 19 nt, Artificial Sequence
  source: /note="Description of Artificial Sequence: Synthetic oligonucleotide"
agccucuaggcuuggaauc

SEQ ID NO: 398 - RNA, 19 nt, Artificial Sequence
  source: /note="Description of Artificial Sequence: Synthetic oligonucleotide"
aggccuuugcucaguuggu

SEQ ID NO: 399 - RNA, 19 nt, Artificial Sequence
  source: /note="Description of Artificial Sequence: Synthetic oligonucleotide"
ucuguccauuuccguggua

SEQ ID NO: 400 - RNA, 19 nt, Artificial Sequence
  source: /note="Description of Artificial Sequence: Synthetic oligonucleotide"
cucuguccauuuccguggu

SEQ ID NO: 401 - RNA, 19 nt, Artificial Sequence
  source: /note="Description of Artificial Sequence: Synthetic oligonucleotide"
aacucuguccauuuccgug

SEQ ID NO: 402 - RNA, 19 nt, Artificial Sequence
  source: /note="Description of Artificial Sequence: Synthetic oligonucleotide"
uaacucuguccauuuccgu

SEQ ID NO: 403 - RNA, 19 nt, Artificial Sequence
  source: /note="Description of Artificial Sequence: Synthetic oligonucleotide"
auaacucuguccauuuccg

SEQ ID NO: 404 - RNA, 19 nt, Artificial Sequence
  source: /note="Description of Artificial Sequence: Synthetic oligonucleotide"
cuugauaacucuguccauu

SEQ ID NO: 405 - RNA, 19 nt, Artificial Sequence
  source: /note="Description of Artificial Sequence: Synthetic oligonucleotide"
ccuugauaacucuguccau

SEQ ID NO: 406 - RNA, 19 nt, Artificial Sequence
  source: /note="Description of Artificial Sequence: Synthetic oligonucleotide"
ugccuugauaacucugucc

SEQ ID NO: 407 - RNA, 19 nt, Artificial Sequence
  source: /note="Description of Artificial Sequence: Synthetic oligonucleotide"
gugccuugauaacucuguc

SEQ ID NO: 408 - RNA, 19 nt, Artificial Sequence
  source: /note="Description of Artificial Sequence: Synthetic oligonucleotide"
ugugccuugauaacucugu

SEQ ID NO: 409 - RNA, 19 nt, Artificial Sequence
  source: /note="Description of Artificial Sequence: Synthetic oligonucleotide"
guaugugccuugauaacuc

SEQ ID NO: 410 - RNA, 19 nt, Artificial Sequence
  source: /note="Description of Artificial Sequence: Synthetic oligonucleotide"
aguaugugccuugauaacu

SEQ ID NO: 411 - RNA, 19 nt, Artificial Sequence
  source: /note="Description of Artificial Sequence: Synthetic oligonucleotide"
aaguaugugccuugauaac

SEQ ID NO: 412 - RNA, 19 nt, Artificial Sequence
  source: /note="Description of Artificial Sequence: Synthetic oligonucleotide"
cuugaucaagccagcauuu

SEQ ID NO: 413 - RNA, 19 nt, Artificial Sequence
  source: /note="Description of Artificial Sequence: Synthetic oligonucleotide"
caguaguucuugaucaagc

SEQ ID NO: 414 - RNA, 19 nt, Artificial Sequence
  source: /note="Description of Artificial Sequence: Synthetic oligonucleotide"
uuguauaacaccaaggggc

SEQ ID NO: 415 - RNA, 19 nt, Artificial Sequence
  source: /note="Description of Artificial Sequence: Synthetic oligonucleotide"
uguuguauaacaccaaggg

SEQ ID NO: 416 - RNA, 19 nt, Artificial Sequence
  source: /note="Description of Artificial Sequence: Synthetic oligonucleotide"
aucuguuguauaacaccaa

SEQ ID NO: 417 - RNA, 19 nt, Artificial Sequence
  source: /note="Description of Artificial Sequence: Synthetic oligonucleotide"
gggaucuguuguauaacac

SEQ ID NO: 418 - RNA, 19 nt, Artificial Sequence
  source: /note="Description of Artificial Sequence: Synthetic oligonucleotide"
cacugggaucuguuguaua

SEQ ID NO: 419 - RNA, 19 nt, Artificial Sequence
  source: /note="Description of Artificial Sequence: Synthetic oligonucleotide"
ggcauugugucagguugca

SEQ ID NO: 420 - RNA, 19 nt, Artificial Sequence
  source: /note="Description of Artificial Sequence: Synthetic oligonucleotide"
aggcauugugucagguugc

SEQ ID NO: 421 - RNA, 19 nt, Artificial Sequence
  source: /note="Description of Artificial Sequence: Synthetic oligonucleotide"
ugggaccaccgugagaguu

SEQ ID NO: 422 - RNA, 19 nt, Artificial Sequence
  source: /note="Description of Artificial Sequence: Synthetic oligonucleotide"
aucugggaccaccgugaga

SEQ ID NO: 423 - RNA, 19 nt, Artificial Sequence
  source: /note="Description of Artificial Sequence: Synthetic oligonucleotide"
uuggaucugggaccaccgu

SEQ ID NO: 424 - RNA, 19 nt, Artificial Sequence
  source: /note="Description of Artificial Sequence: Synthetic oligonucleotide"
gugcuuggaucugggacca

SEQ ID NO: 425 - RNA, 19 nt, Artificial Sequence
  source: /note="Description of Artificial Sequence: Synthetic oligonucleotide"
ucugugcuuggaucuggga

SEQ ID NO: 426 - RNA, 19 nt, Artificial Sequence
  source: /note="Description of Artificial Sequence: Synthetic oligonucleotide"
agccucugugcuuggaucu

SEQ ID NO: 427 - RNA, 19 nt, Artificial Sequence
  source: /note="Description of Artificial Sequence: Synthetic oligonucleotide"
aagccucugugcuuggauc

SEQ ID NO: 428 - RNA, 19 nt, Artificial Sequence
  source: /note="Description of Artificial Sequence: Synthetic oligonucleotide"
gaagccucugugcuuggau

SEQ ID NO: 429 - RNA, 19 nt, Artificial Sequence
  source: /note="Description of Artificial Sequence: Synthetic oligonucleotide"
cuuccugugacagugguag

SEQ ID NO: 430 - RNA, 19 nt, Artificial Sequence
  source: /note="Description of Artificial Sequence: Synthetic oligonucleotide"
acauugcgucagguugcag

SEQ ID NO: 431 - RNA, 19 nt, Artificial Sequence
  source: /note="Description of Artificial Sequence: Synthetic oligonucleotide"
gacauugcgucagguugca

SEQ ID NO: 432 - RNA, 19 nt, Artificial Sequence
  source: /note="Description of Artificial Sequence: Synthetic oligonucleotide"
ggacauugcgucagguugc

SEQ ID NO: 433 - RNA, 19 nt, Artificial Sequence
  source: /note="Description of Artificial Sequence: Synthetic oligonucleotide"
accccagugcuguuuucag

SEQ ID NO: 434 - RNA, 19 nt, Artificial Sequence
  source: /note="Description of Artificial Sequence: Synthetic oligonucleotide"
gugugccucgauaacucug

SEQ ID NO: 435 - RNA, 19 nt, Artificial Sequence
  source: /note="Description of Artificial Sequence: Synthetic oligonucleotide"
agugugccucgauaacucu

SEQ ID NO: 436 - RNA, 19 nt, Artificial Sequence
  source: /note="Description of Artificial Sequence: Synthetic oligonucleotide"
gagugugccucgauaacuc

SEQ ID NO: 437 - RNA, 19 nt, Artificial Sequence
  source: /note="Description of Artificial Sequence: Synthetic oligonucleotide"
agagugugccucgauaacu

SEQ ID NO: 438 - RNA, 19 nt, Artificial Sequence
  source: /note="Description of Artificial Sequence: Synthetic oligonucleotide"
gagagugugccucgauaac

SEQ ID NO: 439 - RNA, 19 nt, Artificial Sequence
  source: /note="Description of Artificial Sequence: Synthetic oligonucleotide"
ggagagugugccucgauaa

SEQ ID NO: 440 - RNA, 19 nt, Artificial Sequence
  source: /note="Description of Artificial Sequence: Synthetic oligonucleotide"
uggagagugugccucgaua

SEQ ID NO: 441 - RNA, 19 nt, Artificial Sequence
  source: /note="Description of Artificial Sequence: Synthetic oligonucleotide"
guggagagugugccucgau

SEQ ID NO: 442 - RNA, 19 nt, Artificial Sequence
  source: /note="Description of Artificial Sequence: Synthetic oligonucleotide"
uagugguggagagugugcc

SEQ ID NO: 443 - RNA, 19 nt, Artificial Sequence
  source: /note="Description of Artificial Sequence: Synthetic oligonucleotide"
ccugugauagugguggaga

SEQ ID NO: 444 - RNA, 19 nt, Artificial Sequence
  source: /note="Description of Artificial Sequence: Synthetic oligonucleotide"
ccaauguggugucauagac

SEQ ID NO: 445 - RNA, 19 nt, Artificial Sequence
  source: /note="Description of Artificial Sequence: Synthetic oligonucleotide"
augccaauguggugucaua

SEQ ID NO: 446 - RNA, 19 nt, Artificial Sequence
  source: /note="Description of Artificial Sequence: Synthetic oligonucleotide"
uccgaugccaauguggugu

SEQ ID NO: 447 - RNA, 19 nt, Artificial Sequence
  source: /note="Description of Artificial Sequence: Synthetic oligonucleotide"
cuccgaugccaauguggug

SEQ ID NO: 448 - RNA, 19 nt, Artificial Sequence
  source: /note="Description of Artificial Sequence: Synthetic oligonucleotide"
ccuccgaugccaauguggu

SEQ ID NO: 449 - RNA, 19 nt, Artificial Sequence
  source: /note="Description of Artificial Sequence: Synthetic oligonucleotide"
uccuccgaugccaaugugg

SEQ ID NO: 450 - RNA, 19 nt, Artificial Sequence
  source: /note="Description of Artificial Sequence: Synthetic oligonucleotide"
auccuccgaugccaaugug

SEQ ID NO: 451 - RNA, 19 nt, Artificial Sequence
  source: /note="Description of Artificial Sequence: Synthetic oligonucleotide"
gauccuccgaugccaaugu

SEQ ID NO: 452 - RNA, 19 nt, Artificial Sequence
  source: /note="Description of Artificial Sequence: Synthetic oligonucleotide"
ggauccuccgaugccaaug

SEQ ID NO: 453 - RNA, 19 nt, Artificial Sequence
  source: /note="Description of Artificial Sequence: Synthetic oligonucleotide"
gggauccuccgaugccaau

SEQ ID NO: 454 - RNA, 19 nt, Artificial Sequence
  source: /note="Description of Artificial Sequence: Synthetic oligonucleotide"
aaugggauccuccgaugcc

SEQ ID NO: 455 - RNA, 19 nt, Artificial Sequence
  source: /note="Description of Artificial Sequence: Synthetic oligonucleotide"
acaucgugucagguugcag

SEQ ID NO: 456 - RNA, 19 nt, Artificial Sequence
  source: /note="Description of Artificial Sequence: Synthetic oligonucleotide"
gacaucgugucagguugca

SEQ ID NO: 457 - RNA, 19 nt, Artificial Sequence
  source: /note="Description of Artificial Sequence: Synthetic oligonucleotide"
ggacaucgugucagguugc

SEQ ID NO: 458 - RNA, 19 nt, Artificial Sequence
  source: /note="Description of Artificial Sequence: Synthetic oligonucleotide"
uggacaucgugucagguug

SEQ ID NO: 459 - RNA, 19 nt, Artificial Sequence
  source: /note="Description of Artificial Sequence: Synthetic oligonucleotide"
cuggacaucgugucagguu

SEQ ID NO: 460 - RNA, 19 nt, Artificial Sequence
  source: /note="Description of Artificial Sequence: Synthetic oligonucleotide"
cacuggacaucgugucagg

SEQ ID NO: 461 - RNA, 19 nt, Artificial Sequence
  source: /note="Description of Artificial Sequence: Synthetic oligonucleotide"
ucacuggacaucgugucag

SEQ ID NO: 462 - RNA, 19 nt, Artificial Sequence
  source: /note="Description of Artificial Sequence: Synthetic oligonucleotide"
gucacuggacaucguguca

SEQ ID NO: 463 - RNA, 19 nt, Artificial Sequence
  source: /note="Description of Artificial Sequence: Synthetic oligonucleotide"
ugucacuggacaucguguc

SEQ ID NO: 464 - RNA, 19 nt, Artificial Sequence
  source: /note="Description of Artificial Sequence: Synthetic oligonucleotide"
cugucacuggacaucgugu

SEQ ID NO: 465 - RNA, 19 nt, Artificial Sequence
  source: /note="Description of Artificial Sequence: Synthetic oligonucleotide"
auucugucacuggacaucg

SEQ ID NO: 466 - RNA, 19 nt, Artificial Sequence
  source: /note="Description of Artificial Sequence: Synthetic oligonucleotide"
cgauaacuccguccaucac

SEQ ID NO: 467 - RNA, 19 nt, Artificial Sequence
  source: /note="Description of Artificial Sequence: Synthetic oligonucleotide"
ucgauaacuccguccauca

SEQ ID NO: 468 - RNA, 19 nt, Artificial Sequence
  source: /note="Description of Artificial Sequence: Synthetic oligonucleotide"
cucgauaacuccguccauc

SEQ ID NO: 469 - RNA, 19 nt, Artificial Sequence
  source: /note="Description of Artificial Sequence: Synthetic oligonucleotide"
ccucgauaacuccguccau

SEQ ID NO: 470 - RNA, 19 nt, Artificial Sequence
  source: /note="Description of Artificial Sequence: Synthetic oligonucleotide"
gccucgauaacuccgucca

SEQ ID NO: 471 - RNA, 19 nt, Artificial Sequence
  source: /note="Description of Artificial Sequence: Synthetic oligonucleotide"
ugccucgauaacuccgucc

SEQ ID NO: 472 - RNA, 19 nt, Artificial Sequence
  source: /note="Description of Artificial Sequence: Synthetic oligonucleotide"
ggauaugccucgauaacuc

SEQ ID NO: 473 - RNA, 19 nt, Artificial Sequence
  source: /note="Description of Artificial Sequence: Synthetic oligonucleotide"
aggauaugccucgauaacu

SEQ ID NO: 474 - RNA, 19 nt, Artificial Sequence
  source: /note="Description of Artificial Sequence: Synthetic oligonucleotide"
gaggauaugccucgauaac

SEQ ID NO: 475 - RNA, 19 nt, Artificial Sequence
  source: /note="Description of Artificial Sequence: Synthetic oligonucleotide"
ggaggauaugccucgauaa

SEQ ID NO: 476 - RNA, 19 nt, Artificial Sequence
  source: /note="Description of Artificial Sequence: Synthetic oligonucleotide"
aagauugacagguccuucc

SEQ ID NO: 477 - RNA, 19 nt, Artificial Sequence
  source: /note="Description of Artificial Sequence: Synthetic oligonucleotide"
ccaagauugacagguccuu

SEQ ID NO: 478 - RNA, 19 nt, Artificial Sequence
  source: /note="Description of Artificial Sequence: Synthetic oligonucleotide"
accaagauugacagguccu

SEQ ID NO: 479 - RNA, 19 nt, Artificial Sequence
  source: /note="Description of Artificial Sequence: Synthetic oligonucleotide"
gaccaagauugacaggucc

SEQ ID NO: 480 - RNA, 19 nt, Artificial Sequence
  source: /note="Description of Artificial Sequence: Synthetic oligonucleotide"
aguaguucucggucaggcc

SEQ ID NO: 481 - RNA, 19 nt, Artificial Sequence
  source: /note="Description of Artificial Sequence: Synthetic oligonucleotide"
gcaguaguucucggucagg

SEQ ID NO: 482 - RNA, 19 nt, Artificial Sequence
  source: /note="Description of Artificial Sequence: Synthetic oligonucleotide"
ugcaguaguucucggucag

SEQ ID NO: 483 - RNA, 19 nt, Artificial Sequence
  source: /note="Description of Artificial Sequence: Synthetic oligonucleotide"
cugcaguaguucucgguca

SEQ ID NO: 484 - RNA, 19 nt, Artificial Sequence
  source: /note="Description of Artificial Sequence: Synthetic oligonucleotide"
uucccagaaucuggauucc

SEQ ID NO: 485 - RNA, 19 nt, Artificial Sequence
  source: /note="Description of Artificial Sequence: Synthetic oligonucleotide"
guuucccagaaucuggauu

SEQ ID NO: 486 - RNA, 19 nt, Artificial Sequence
  source: /note="Description of Artificial Sequence: Synthetic oligonucleotide"
accaggguuguuucccaga

SEQ ID NO: 487 - RNA, 19 nt, Artificial Sequence
  source: /note="Description of Artificial Sequence: Synthetic oligonucleotide"
caccaggguuguuucccag

SEQ ID NO: 488 - RNA, 19 nt, Artificial Sequence
  source: /note="Description of Artificial Sequence: Synthetic oligonucleotide"
aacaccaggguuguuuccc

SEQ ID NO: 489 - RNA, 19 nt, Artificial Sequence
  source: /note="Description of Artificial Sequence: Synthetic oligonucleotide"
guaacaccaggguuguuuc

SEQ ID NO: 490 - RNA, 19 nt, Artificial Sequence
  source: /note="Description of Artificial Sequence: Synthetic oligonucleotide"
uguaacaccaggguuguuu

SEQ ID NO: 491 - RNA, 19 nt, Artificial Sequence
  source: /note="Description of Artificial Sequence: Synthetic oligonucleotide"
guguaacaccaggguuguu

SEQ ID NO: 492 - RNA, 19 nt, Artificial Sequence
  source: /note="Description of Artificial Sequence: Synthetic oligonucleotide"
uguguaacaccaggguugu

SEQ ID NO: 493 - RNA, 19 nt, Artificial Sequence
  source: /note="Description of Artificial Sequence: Synthetic oligonucleotide"
uuguguaacaccaggguug

SEQ ID NO: 494 - RNA, 19 nt, Artificial Sequence
  source: /note="Description of Artificial Sequence: Synthetic oligonucleotide"
guuguguaacaccaggguu

SEQ ID NO: 495 - RNA, 19 nt, Artificial Sequence
  source: /note="Description of Artificial Sequence: Synthetic oligonucleotide"
uacucccaccucacacacg

SEQ ID NO: 496 - RNA, 19 nt, Artificial Sequence
  source: /note="Description of Artificial Sequence: Synthetic oligonucleotide"
gugucagauugcaguacuc

SEQ ID NO: 497 - RNA, 19 nt, Artificial Sequence
  source: /note="Description of Artificial Sequence: Synthetic oligonucleotide"
agcauugugucagauugca

SEQ ID NO: 498 - RNA, 19 nt, Artificial Sequence
  source: /note="Description of Artificial Sequence: Synthetic oligonucleotide"
gagcauugugucagauugc

SEQ ID NO: 499 - RNA, 19 nt, Artificial Sequence
  source: /note="Description of Artificial Sequence: Synthetic oligonucleotide"
ugagcauugugucagauug

SEQ ID NO: 500 - RNA, 19 nt, Artificial Sequence
  source: /note="Description of Artificial Sequence: Synthetic oligonucleotide"
acuggaacaacagugggag

SEQ ID NO: 501 - RNA, 19 nt, Artificial Sequence
  source: /note="Description of Artificial Sequence: Synthetic oligonucleotide"
aacuggaacaacaguggga

SEQ ID NO: 502 - RNA, 19 nt, Artificial Sequence
  source: /note="Description of Artificial Sequence: Synthetic oligonucleotide"
ggaacuggaacaacagugg

SEQ ID NO: 503 - RNA, 19 nt, Artificial Sequence
  source: /note="Description of Artificial Sequence: Synthetic oligonucleotide"
uggaacuggaacaacagug

SEQ ID NO: 504 - RNA, 19 nt, Artificial Sequence
  source: /note="Description of Artificial Sequence: Synthetic oligonucleotide"
ugcuuggaacuggaacaac

SEQ ID NO: 505 - RNA, 19 nt, Artificial Sequence
  source: /note="Description of Artificial Sequence: Synthetic oligonucleotide"
caugcuuggaacuggaaca

SEQ ID NO: 506 - RNA, 19 nt, Artificial Sequence
  source: /note="Description of Artificial Sequence: Synthetic oligonucleotide"
ccaugcuuggaacuggaac

SEQ ID NO: 507 - RNA, 19 nt, Artificial Sequence
  source: /note="Description of Artificial Sequence: Synthetic oligonucleotide"
uucagaaugagccuccaug

SEQ ID NO: 508 - RNA, 19 nt, Artificial Sequence
  source: /note="Description of Artificial Sequence: Synthetic oligonucleotide"
cuucagaaugagccuccau

SEQ ID NO: 509 - RNA, 19 nt, Artificial Sequence
  source: /note="Description of Artificial Sequence: Synthetic oligonucleotide"
ugcuucagaaugagccucc

SEQ ID NO: 510 - RNA, 19 nt, Artificial Sequence
  source: /note="Description of Artificial Sequence: Synthetic oligonucleotide"
uuggugcugcuucagaaug

SEQ ID NO: 511 - RNA, 19 nt, Artificial Sequence
  source: /note="Description of Artificial Sequence: Synthetic oligonucleotide"
gcucaguuggugcugcuuc

SEQ ID NO: 512 - RNA, 19 nt, Artificial Sequence
  source: /note="Description of Artificial Sequence: Synthetic oligonucleotide"
uuugcucaguuggugcugc

SEQ ID NO: 513 - RNA, 19 nt, Artificial Sequence
  source: /note="Description of Artificial Sequence: Synthetic oligonucleotide"
uaccaugguagcacugccg

SEQ ID NO: 514 - RNA, 19 nt, Artificial Sequence
  source: /note="Description of Artificial Sequence: Synthetic oligonucleotide"
cauuaccaugguagcacug

SEQ ID NO: 515 - RNA, 19 nt, Artificial Sequence
  source: /note="Description of Artificial Sequence: Synthetic oligonucleotide"
gccauuaccaugguagcac

SEQ ID NO: 516 - RNA, 19 nt, Artificial Sequence
  source: /note="Description of Artificial Sequence: Synthetic oligonucleotide"
aacucuggccauuaccaug

SEQ ID NO: 517 - RNA, 19 nt, Artificial Sequence
  source: /note="Description of Artificial Sequence: Synthetic oligonucleotide"
gauaacucuggccauuacc

SEQ ID NO: 518 - RNA, 19 nt, Artificial Sequence
  source: /note="Description of Artificial Sequence: Synthetic oligonucleotide"
cgauaacucuggccauuac

SEQ ID NO: 519 - RNA, 19 nt, Artificial Sequence
  source: /note="Description of Artificial Sequence: Synthetic oligonucleotide"
ucgauaacucuggccauua

SEQ ID NO: 520 - RNA, 19 nt, Artificial Sequence
  source: /note="Description of Artificial Sequence: Synthetic oligonucleotide"
gccucgauaacucuggcca

SEQ ID NO: 521 - RNA, 19 nt, Artificial Sequence
  source: /note="Description of Artificial Sequence: Synthetic oligonucleotide"
ugccucgauaacucuggcc

SEQ ID NO: 522 - RNA, 19 nt, Artificial Sequence
  source: /note="Description of Artificial Sequence: Synthetic oligonucleotide"
gugccucgauaacucuggc

SEQ ID NO: 523 - RNA, 19 nt, Artificial Sequence
  source: /note="Description of Artificial Sequence: Synthetic oligonucleotide"
ugugccucgauaacucugg

SEQ ID NO: 524 - RNA, 19 nt, Artificial Sequence
  source: /note="Description of Artificial Sequence: Synthetic oligonucleotide"
aaugugccucgauaacucu

SEQ ID NO: 525 - RNA, 19 nt, Artificial Sequence
  source: /note="Description of Artificial Sequence: Synthetic oligonucleotide"
gaaugugccucgauaacuc

SEQ ID NO: 526 - RNA, 19 nt, Artificial Sequence
  source: /note="Description of Artificial Sequence: Synthetic oligonucleotide"
agaaugugccucgauaacu

SEQ ID NO: 527 - RNA, 19 nt, Artificial Sequence
  source: /note="Description of Artificial Sequence: Synthetic oligonucleotide"
acagugguggagaaugugc

SEQ ID NO: 528 - RNA, 19 nt, Artificial Sequence
  source: /note="Description of Artificial Sequence: Synthetic oligonucleotide"
ugugacagugguggagaau

SEQ ID NO: 529 - RNA, 19 nt, Artificial Sequence
  source: /note="Description of Artificial Sequence: Synthetic oligonucleotide"
uugacauguccuuccugug

SEQ ID NO: 530 - RNA, 19 nt, Artificial Sequence
  source: /note="Description of Artificial Sequence: Synthetic oligonucleotide"
caagauugacauguccuuc

SEQ ID NO: 531 - RNA, 19 nt, Artificial Sequence
  source: /note="Description of Artificial Sequence: Synthetic oligonucleotide"
ugcugggguccaugguaaa

SEQ ID NO: 532 - RNA, 19 nt, Artificial Sequence
  source: /note="Description of Artificial Sequence: Synthetic oligonucleotide"
augcugggguccaugguaa

SEQ ID NO: 533 - RNA, 19 nt, Artificial Sequence
  source: /note="Description of Artificial Sequence: Synthetic oligonucleotide"
caucgcgucagguugcagu

SEQ ID NO: 534 - RNA, 19 nt, Artificial Sequence
  source: /note="Description of Artificial Sequence: Synthetic oligonucleotide"
ucugagcaucgcgucaggu

SEQ ID NO: 535 - RNA, 19 nt, Artificial Sequence
  source: /note="Description of Artificial Sequence: Synthetic oligonucleotide"
gugucugagcaucgcguca

SEQ ID NO: 536 - RNA, 19 nt, Artificial Sequence
  source: /note="Description of Artificial Sequence: Synthetic oligonucleotide"
ugugucugagcaucgcguc

SEQ ID NO: 537 - RNA, 19 nt, Artificial Sequence
  source: /note="Description of Artificial Sequence: Synthetic oligonucleotide"
cugugucugagcaucgcgu

SEQ ID NO: 538 - RNA, 19 nt, Artificial Sequence
  source: /note="Description of Artificial Sequence: Synthetic oligonucleotide"
ucugugucugagcaucgcg

SEQ ID NO: 539 - RNA, 19 nt, Artificial Sequence
  source: /note="Description of Artificial Sequence: Synthetic oligonucleotide"
gagauucgagguucacuuc

SEQ ID NO: 540 - RNA, 19 nt, Artificial Sequence
  source: /note="Description of Artificial Sequence: Synthetic oligonucleotide"
gauguaacauucaguccug

SEQ ID NO: 541 - RNA, 19 nt, Artificial Sequence
  source: /note="Description of Artificial Sequence: Synthetic oligonucleotide"
ucccaaagguaccuugggu

SEQ ID NO: 542 - RNA, 19 nt, Artificial Sequence
  source: /note="Description of Artificial Sequence: Synthetic oligonucleotide"
gucccaaagguaccuuggg

SEQ ID NO: 543 - RNA, 19 nt, Artificial Sequence
  source: /note="Description of Artificial Sequence: Synthetic oligonucleotide"
aaggccagucccaaaggua

SEQ ID NO: 544 - RNA, 19 nt, Artificial Sequence
  source: /note="Description of Artificial Sequence: Synthetic oligonucleotide"
gaaggccagucccaaaggu

SEQ ID NO: 545 - RNA, 19 nt, Artificial Sequence
  source: /note="Description of Artificial Sequence: Synthetic oligonucleotide"
ucuucguuugauugcuguc

SEQ ID NO: 546 - RNA, 19 nt, Artificial Sequence
  source: /note="Description of Artificial Sequence: Synthetic oligonucleotide"
gucuucguuugauugcugu

SEQ ID NO: 547 - RNA, 19 nt, Artificial Sequence
  source: /note="Description of Artificial Sequence: Synthetic oligonucleotide"
ugucuucguuugauugcug

SEQ ID NO: 548 - RNA, 19 nt, Artificial Sequence
  source: /note="Description of Artificial Sequence: Synthetic oligonucleotide"
gugucuucguuugauugcu

SEQ ID NO: 549 - RNA, 19 nt, Artificial Sequence
  source: /note="Description of Artificial Sequence: Synthetic oligonucleotide"
agugucuucguuugauugc

SEQ ID NO: 550 - RNA, 19 nt, Artificial Sequence
  source: /note="Description of Artificial Sequence: Synthetic oligonucleotide"
cagugucuucguuugauug

SEQ ID NO: 551 - RNA, 19 nt, Artificial Sequence
  source: /note="Description of Artificial Sequence: Synthetic oligonucleotide"
aacagugucuucguuugau

SEQ ID NO: 552 - RNA, 19 nt, Artificial Sequence
  source: /note="Description of Artificial Sequence: Synthetic oligonucleotide"
gaacagugucuucguuuga

SEQ ID NO: 553 - RNA, 19 nt, Artificial Sequence
  source: /note="Description of Artificial Sequence: Synthetic oligonucleotide"
ggaacagugucuucguuug

SEQ ID NO: 554 - RNA, 19 nt, Artificial Sequence
  source: /note="Description of Artificial Sequence: Synthetic oligonucleotide"
gggaacagugucuucguuu

SEQ ID NO: 555 - RNA, 19 nt, Artificial Sequence
  source: /note="Description of Artificial Sequence: Synthetic oligonucleotide"
ugggaacagugucuucguu

SEQ ID NO: 556 - RNA, 19 nt, Artificial Sequence
  source: /note="Description of Artificial Sequence: Synthetic oligonucleotide"
cugggaacagugucuucgu

SEQ ID NO: 557 - RNA, 19 nt, Artificial Sequence
  source: /note="Description of Artificial Sequence: Synthetic oligonucleotide"
gcugggaacagugucuucg

SEQ ID NO: 558 - RNA, 19 nt, Artificial Sequence
  source: /note="Description of Artificial Sequence: Synthetic oligonucleotide"
agcugggaacagugucuuc

SEQ ID NO: 559 - RNA, 19 nt, Artificial Sequence
  source: /note="Description of Artificial Sequence: Synthetic oligonucleotide"
uagcugggaacagugucuu

SEQ ID NO: 560 - RNA, 19 nt, Artificial Sequence
  source: /note="Description of Artificial Sequence: Synthetic oligonucleotide"
guagcugggaacagugucu

SEQ ID NO: 561 - RNA, 19 nt, Artificial Sequence
  source: /note="Description of Artificial Sequence: Synthetic oligonucleotide"
gguagcugggaacaguguc

SEQ ID NO: 562 - RNA, 19 nt, Artificial Sequence
  source: /note="Description of Artificial Sequence: Synthetic oligonucleotide"
ugguagcugggaacagugu

SEQ ID NO: 563 - RNA, 19 nt, Artificial Sequence
  source: /note="Description of Artificial Sequence: Synthetic oligonucleotide"
uggcauagcugguagcugg

SEQ ID NO: 564 - RNA, 19 nt, Artificial Sequence
  source: /note="Description of Artificial Sequence: Synthetic oligonucleotide"
uuggcauagcugguagcug

SEQ ID NO: 565 - RNA, 19 nt, Artificial Sequence
  source: /note="Description of Artificial Sequence: Synthetic oligonucleotide"
uuuggcauagcugguagcu

SEQ ID NO: 566 - RNA, 19 nt, Artificial Sequence
  source: /note="Description of Artificial Sequence: Synthetic oligonucleotide"
guuuggcauagcugguagc

SEQ ID NO: 567 - RNA, 19 nt, Artificial Sequence
  source: /note="Description of Artificial Sequence: Synthetic oligonucleotide"
gguuuggcauagcugguag

SEQ ID NO: 568 - RNA, 19 nt, Artificial Sequence
  source: /note="Description of Artificial Sequence: Synthetic oligonucleotide"
agguuuggcauagcuggua

SEQ ID NO: 569 - RNA, 19 nt, Artificial Sequence
  source: /note="Description of Artificial Sequence: Synthetic oligonucleotide"
acaaaaauaccaaaaaugc

SEQ ID NO: 570 - RNA, 19 nt, Artificial Sequence
  source: /note="Description of Artificial Sequence: Synthetic oligonucleotide"
cacaaaaauaccaaaaaug

SEQ ID NO: 571 - RNA, 19 nt, Artificial Sequence
  source: /note="Description of Artificial Sequence: Synthetic oligonucleotide"
acacaaaaauaccaaaaau

SEQ ID NO: 572 - RNA, 19 nt, Artificial Sequence
  source: /note="Description of Artificial Sequence: Synthetic oligonucleotide"
uacacaaaaauaccaaaaa

SEQ ID NO: 573 - RNA, 19 nt, Artificial Sequence
  source: /note="Description of Artificial Sequence: Synthetic oligonucleotide"
auacacaaaaauaccaaaa

SEQ ID NO: 574 - RNA, 19 nt, Artificial Sequence
  source: /note="Description of Artificial Sequence: Synthetic oligonucleotide"
uauacacaaaaauaccaaa

SEQ ID NO: 575 - RNA, 19 nt, Artificial Sequence
  source: /note="Description of Artificial Sequence: Synthetic oligonucleotide"
uuauacacaaaaauaccaa

SEQ ID NO: 576 - RNA, 19 nt, Artificial Sequence
  source: /note="Description of Artificial Sequence: Synthetic oligonucleotide"
cuuauacacaaaaauacca

SEQ ID NO: 577 - RNA, 19 nt, Artificial Sequence
  source: /note="Description of Artificial Sequence: Synthetic oligonucleotide"
gcuuauacacaaaaauacc

SEQ ID NO: 578 - RNA, 19 nt, Artificial Sequence
  source: /note="Description of Artificial Sequence: Synthetic oligonucleotide"
agcuuauacacaaaaauac

SEQ ID NO: 579 - RNA, 19 nt, Artificial Sequence
  source: /note="Description of Artificial Sequence: Synthetic oligonucleotide"
aagcuuauacacaaaaaua

SEQ ID NO: 580 - RNA, 19 nt, Artificial Sequence
  source: /note="Description of Artificial Sequence: Synthetic oligonucleotide"
aaagcuuauacacaaaaau

SEQ ID NO: 581 - RNA, 19 nt, Artificial Sequence
  source: /note="Description of Artificial Sequence: Synthetic oligonucleotide"
aaaagcuuauacacaaaaa

SEQ ID NO: 582 - RNA, 19 nt, Artificial Sequence
  source: /note="Description of Artificial Sequence: Synthetic oligonucleotide"
gcagaguuuauuuuuaaca

SEQ ID NO: 583 - RNA, 19 nt, Artificial Sequence
  source: /note="Description of Artificial Sequence: Synthetic oligonucleotide"
ugcagaguuuauuuuuaac

SEQ ID NO: 584 - RNA, 19 nt, Artificial Sequence
  source: /note="Description of Artificial Sequence: Synthetic oligonucleotide"
gugcagaguuuauuuuuaa

SEQ ID NO: 585 - RNA, 19 nt, Artificial Sequence
  source: /note="Description of Artificial Sequence: Synthetic oligonucleotide"
agugcagaguuuauuuuua

SEQ ID NO: 586 - RNA, 19 nt, Artificial Sequence
  source: /note="Description of Artificial Sequence: Synthetic oligonucleotide"
aagugcagaguuuauuuuu

SEQ ID NO: 587 - RNA, 19 nt, Artificial Sequence
  source: /note="Description of Artificial Sequence: Synthetic oligonucleotide"
uaagugcagaguuuauuuu

SEQ ID NO: 588 - RNA, 19 nt, Artificial Sequence
  source: /note="Description of Artificial Sequence: Synthetic oligonucleotide"
auaagugcagaguuuauuu

SEQ ID NO: 589 - RNA, 19 nt, Artificial Sequence
  source: /note="Description of Artificial Sequence: Synthetic oligonucleotide"
aauaagugcagaguuuauu

SEQ ID NO: 590 - RNA, 19 nt, Artificial Sequence
  source: /note="Description of Artificial Sequence: Synthetic oligonucleotide"
aaauaagugcagaguuuau

SEQ ID NO: 591 - RNA, 19 nt, Artificial Sequence
  source: /note="Description of Artificial Sequence: Synthetic oligonucleotide"
aaaauaagugcagaguuua

SEQ ID NO: 592 - RNA, 19 nt, Artificial Sequence
  source: /note="Description of Artificial Sequence: Synthetic oligonucleotide"
caaaauaagugcagaguuu

SEQ ID NO: 593 - RNA, 19 nt, Artificial Sequence
  source: /note="Description of Artificial Sequence: Synthetic oligonucleotide"
ucaaaauaagugcagaguu

SEQ ID NO: 594 - RNA, 19 nt, Artificial Sequence
  source: /note="Description of Artificial Sequence: Synthetic oligonucleotide"
aucaaaauaagugcagagu

SEQ ID NO: 595 - RNA, 19 nt, Artificial Sequence
  source: /note="Description of Artificial Sequence: Synthetic oligonucleotide"
aaucaaaauaagugcagag

SEQ ID NO: 596 - RNA, 19 nt, Artificial Sequence
  source: /note="Description of Artificial Sequence: Synthetic oligonucleotide"
aaaucaaaauaagugcaga

SEQ ID NO: 597 - RNA, 19 nt, Artificial Sequence
  source: /note="Description of Artificial Sequence: Synthetic oligonucleotide"
caaaucaaaauaagugcag

SEQ ID NO: 598 - RNA, 19 nt, Artificial Sequence
  source: /note="Description of Artificial Sequence: Synthetic oligonucleotide"
ucaaaucaaaauaagugca

SEQ ID NO: 599 - DNA, 23 bp, Artificial Sequence
  source: /note="Description of Artificial Sequence: Synthetic oligonucleotide"
  source: /note="Description of Combined DNA/RNA Molecule: Synthetic oligonucleotide"
  modified_base (1)..(1): 2'-OMe-nucleotide
  modified_base (2)..(2): 2'-OMe-nucleotide
  modified_base (3)..(3): 2'-OMe-nucleotide
  modified_base (4)..(4): 2'-fluoro-nucleotide
  modified_base (5)..(5): 2'-OMe-nucleotide
  modified_base (6)..(6): 2'-fluoro-nucleotide
  modified_base (7)..(7): 2'-OMe-nucleotide
  modified_base (8)..(8): 2'-fluoro-nucleotide
  modified_base (9)..(9): 2'-OMe-nucleotide
  modified_base (10)..(10): 2'-fluoro-nucleotide
  modified_base (11)..(11): 2'-OMe-nucleotide
  modified_base (12)..(12): 2'-fluoro-nucleotide
  modified_base (13)..(13): 2'-OMe-nucleotide
  modified_base (14)..(14): 2'-fluoro-nucleotide
  modified_base (15)..(15): 2'-OMe-nucleotide
  modified_base (16)..(16): 2'-fluoro-nucleotide
  modified_base (17)..(17): 2'-OMe-nucleotide
  modified_base (18)..(18): 2'-fluoro-nucleotide
  modified_base (19)..(19): 2'-OMe-nucleotide
  modified_base (20)..(20): 2'-fluoro-nucleotide
  modified_base (21)..(21): 2'-OMe-nucleotide
  modified_base (22)..(22): 2'-fluoro-nucleotide
  modified_base (23)..(23): Inverted nucleotide
ccaaccuuuggggcuggcuuuct

SEQ ID NO: 600 - DNA, 23 bp, Artificial Sequence
  source: /note="Description of Artificial Sequence: Synthetic oligonucleotide"
  source: /note="Description of Combined DNA/RNA Molecule: Synthetic oligonucleotide"
  modified_base (1)..(1): 2'-OMe-nucleotide
  modified_base (2)..(2): 2'-OMe-nucleotide
  modified_base (3)..(3): 2'-OMe-nucleotide
  modified_base (4)..(4): 2'-fluoro-nucleotide
  modified_base (5)..(5): 2'-OMe-nucleotide
  modified_base (6)..(6): 2'-fluoro-nucleotide
  modified_base (7)..(7): 2'-OMe-nucleotide
  modified_base (8)..(8): 2'-fluoro-nucleotide
  modified_base (9)..(9): 2'-OMe-nucleotide
  modified_base (10)..(10): 2'-fluoro-nucleotide
  modified_base (11)..(11): 2'-OMe-nucleotide
  modified_base (12)..(12): 2'-fluoro-nucleotide
  modified_base (13)..(13): 2'-OMe-nucleotide
  modified_base (14)..(14): 2'-fluoro-nucleotide
  modified_base (15)..(15): 2'-OMe-nucleotide
  modified_base (16)..(16): 2'-fluoro-nucleotide
  modified_base (17)..(17): 2'-OMe-nucleotide
  modified_base (18)..(18): 2'-fluoro-nucleotide
  modified_base (19)..(19): 2'-OMe-nucleotide
  modified_base (20)..(20): 2'-fluoro-nucleotide
  modified_base (21)..(21): 2'-OMe-nucleotide
  modified_base (22)..(22): 2'-fluoro-nucleotide
  modified_base (23)..(23): Inverted nucleotide
ccagccaugugguccaggauugt

SEQ ID NO: 601 - DNA, 23 bp, Artificial Sequence
  source: /note="Description of Artificial Sequence: Synthetic oligonucleotide"
  source: /note="Description of Combined DNA/RNA Molecule: Synthetic oligonucleotide"
  modified_base (1)..(1): 2'-OMe-nucleotide
  modified_base (2)..(2): 2'-OMe-nucleotide
  modified_base (3)..(3): 2'-OMe-nucleotide
  modified_base (4)..(4): 2'-fluoro-nucleotide
  modified_base (5)..(5): 2'-OMe-nucleotide
  modified_base (6)..(6): 2'-fluoro-nucleotide
  modified_base (7)..(7): 2'-OMe-nucleotide
  modified_base (8)..(8): 2'-fluoro-nucleotide
  modified_base (9)..(9): 2'-OMe-nucleotide
  modified_base (10)..(10): 2'-fluoro-nucleotide
  modified_base (11)..(11): 2'-OMe-nucleotide
  modified_base (12)..(12): 2'-fluoro-nucleotide
  modified_base (13)..(13): 2'-OMe-nucleotide
  modified_base (14)..(14): 2'-fluoro-nucleotide
  modified_base (15)..(15): 2'-OMe-nucleotide
  modified_base (16)..(16): 2'-fluoro-nucleotide
  modified_base (17)..(17): 2'-OMe-nucleotide
  modified_base (18)..(18): 2'-fluoro-nucleotide
  modified_base (19)..(19): 2'-OMe-nucleotide
  modified_base (20)..(20): 2'-fluoro-nucleotide
  modified_base (21)..(21): 2'-OMe-nucleotide
  modified_base (22)..(22): 2'-fluoro-nucleotide
  modified_base (23)..(23): Inverted nucleotide
ccaacagaguuaucgaggcacgt

SEQ ID NO: 602 - DNA, 23 bp, Artificial Sequence
  source: /note="Description of Artificial Sequence: Synthetic oligonucleotide"
  source: /note="Description of Combined DNA/RNA Molecule: Synthetic oligonucleotide"
  modified_base (1)..(1): 2'-OMe-nucleotide
  modified_base (2)..(2): 2'-OMe-nucleotide
  modified_base (3)..(3): 2'-OMe-nucleotide
  modified_base (4)..(4): 2'-fluoro-nucleotide
  modified_base (5)..(5): 2'-OMe-nucleotide
  modified_base (6)..(6): 2'-fluoro-nucleotide
  modified_base (7)..(7): 2'-OMe-nucleotide
  modified_base (8)..(8): 2'-fluoro-nucleotide
  modified_base (9)..(9): 2'-OMe-nucleotide
  modified_base (10)..(10): 2'-fluoro-nucleotide
  modified_base (11)..(11): 2'-OMe-nucleotide
  modified_base (12)..(12): 2'-fluoro-nucleotide
  modified_base (13)..(13): 2'-OMe-nucleotide
  modified_base (14)..(14): 2'-fluoro-nucleotide
  modified_base (15)..(15): 2'-OMe-nucleotide
  modified_base (16)..(16): 2'-fluoro-nucleotide
  modified_base (17)..(17): 2'-OMe-nucleotide
  modified_base (18)..(18): 2'-fluoro-nucleotide
  modified_base (19)..(19): 2'-OMe-nucleotide
  modified_base (20)..(20): 2'-fluoro-nucleotide
  modified_base (21)..(21): 2'-OMe-nucleotide
  modified_base (22)..(22): 2'-fluoro-nucleotide
  modified_base (23)..(23): Inverted nucleotide
ccacagaguuaucgaggcacgut

SEQ ID NO: 603 - DNA, 23 bp, Artificial Sequence
  source: /note="Description of Artificial Sequence: Synthetic oligonucleotide"
  source: /note="Description of Combined DNA/RNA Molecule: Synthetic oligonucleotide"
  modified_base (1)..(1): 2'-OMe-nucleotide
  modified_base (2)..(2): 2'-OMe-nucleotide
  modified_base (3)..(3): 2'-OMe-nucleotide
  modified_base (4)..(4): 2'-fluoro-nucleotide
  modified_base (5)..(5): 2'-OMe-nucleotide
  modified_base (6)..(6): 2'-fluoro-nucleotide
  modified_base (7)..(7): 2'-OMe-nucleotide
  modified_base (8)..(8): 2'-fluoro-nucleotide
  modified_base (9)..(9): 2'-OMe-nucleotide
  modified_base (10)..(10): 2'-fluoro-nucleotide
  modified_base (11)..(11): 2'-OMe-nucleotide
  modified_base (12)..(12): 2'-fluoro-nucleotide
  modified_base (13)..(13): 2'-OMe-nucleotide
  modified_base (14)..(14): 2'-fluoro-nucleotide
  modified_base (15)..(15): 2'-OMe-nucleotide
  modified_base (16)..(16): 2'-fluoro-nucleotide
  modified_base (17)..(17): 2'-OMe-nucleotide
  modified_base (18)..(18): 2'-fluoro-nucleotide
  modified_base (19)..(19): 2'-OMe-nucleotide
  modified_base (20)..(20): 2'-fluoro-nucleotide
  modified_base (21)..(21): 2'-OMe-nucleotide
  modified_base (22)..(22): 2'-fluoro-nucleotide
  modified_base (23)..(23): Inverted nucleotide
ccaagaguuaucgaggcacguat

SEQ ID NO: 604 - DNA, 23 bp, Artificial Sequence
  source: /note="Description of Artificial Sequence: Synthetic oligonucleotide"
  source: /note="Description of Combined DNA/RNA Molecule: Synthetic oligonucleotide"
  modified_base (1)..(1): 2'-OMe-nucleotide
  modified_base (2)..(2): 2'-OMe-nucleotide
  modified_base (3)..(3): 2'-OMe-nucleotide
  modified_base (4)..(4): 2'-fluoro-nucleotide
  modified_base (5)..(5): 2'-OMe-nucleotide
  modified_base (6)..(6): 2'-fluoro-nucleotide
  modified_base (7)..(7): 2'-OMe-nucleotide
  modified_base (8)..(8): 2'-fluoro-nucleotide
  modified_base (9)..(9): 2'-OMe-nucleotide
  modified_base (10)..(10): 2'-fluoro-nucleotide
  modified_base (11)..(11): 2'-OMe-nucleotide
  modified_base (12)..(12): 2'-fluoro-nucleotide
  modified_base (13)..(13): 2'-OMe-nucleotide
  modified_base (14)..(14): 2'-fluoro-nucleotide
  modified_base (15)..(15): 2'-OMe-nucleotide
  modified_base (16)..(16): 2'-fluoro-nucleotide
  modified_base (17)..(17): 2'-OMe-nucleotide
  modified_base (18)..(18): 2'-fluoro-nucleotide
  modified_base (19)..(19): 2'-OMe-nucleotide
  modified_base (20)..(20): 2'-fluoro-nucleotide
  modified_base (21)..(21): 2'-OMe-nucleotide
  modified_base (22)..(22): 2'-fluoro-nucleotide
  modified_base (23)..(23): Inverted nucleotide
ccagaguuaucgaggcacguact

SEQ ID NO: 605 - DNA, 23 bp, Artificial Sequence
  source: /note="Description of Artificial Sequence: Synthetic oligonucleotide"
  source: /note="Description of Combined DNA/RNA Molecule: Synthetic oligonucleotide"
  modified_base (1)..(1): 2'-OMe-nucleotide
  modified_base (2)..(2): 2'-OMe-nucleotide
  modified_base (3)..(3): 2'-OMe-nucleotide
  modified_base (4)..(4): 2'-fluoro-nucleotide
  modified_base (5)..(5): 2'-OMe-nucleotide
  modified_base (6)..(6): 2'-fluoro-nucleotide
  modified_base (7)..(7): 2'-OMe-nucleotide
  modified_base (8)..(8): 2'-fluoro-nucleotide
  modified_base (9)..(9): 2'-OMe-nucleotide
  modified_base (10)..(10): 2'-fluoro-nucleotide
  modified_base (11)..(11): 2'-OMe-nucleotide
  modified_base (12)..(12): 2'-fluoro-nucleotide
  modified_base (13)..(13): 2'-OMe-nucleotide
  modified_base (14)..(14): 2'-fluoro-nucleotide
  modified_base (15)..(15): 2'-OMe-nucleotide
  modified_base (16)..(16): 2'-fluoro-nucleotide
  modified_base (17)..(17): 2'-OMe-nucleotide
  modified_base (18)..(18): 2'-fluoro-nucleotide
  modified_base (19)..(19): 2'-OMe-nucleotide
  modified_base (20)..(20): 2'-fluoro-nucleotide
  modified_base (21)..(21): 2'-OMe-nucleotide
  modified_base (22)..(22): 2'-fluoro-nucleotide
  modified_base (23)..(23): Inverted nucleotide
ccaaguuaucgaggcacguacut

SEQ ID NO: 606 - DNA, 23 bp, Artificial Sequence
  source: /note="Description of Artificial Sequence: Synthetic oligonucleotide"
  source: /note="Description of Combined DNA/RNA Molecule: Synthetic oligonucleotide"
  modified_base (1)..(1): 2'-OMe-nucleotide
  modified_base (2)..(2): 2'-OMe-nucleotide
  modified_base (3)..(3): 2'-OMe-nucleotide
  modified_base (4)..(4): 2'-fluoro-nucleotide
  modified_base (5)..(5): 2'-OMe-nucleotide
  modified_base (6)..(6): 2'-fluoro-nucleotide
  modified_base (7)..(7): 2'-OMe-nucleotide
  modified_base (8)..(8): 2'-fluoro-nucleotide
  modified_base (9)..(9): 2'-OMe-nucleotide
  modified_base (10)..(10): 2'-fluoro-nucleotide
  modified_base (11)..(11): 2'-OMe-nucleotide
  modified_base (12)..(12): 2'-fluoro-nucleotide
  modified_base (13)..(13): 2'-OMe-nucleotide
  modified_base (14)..(14): 2'-fluoro-nucleotide
  modified_base (15)..(15): 2'-OMe-nucleotide
  modified_base (16)..(16): 2'-fluoro-nucleotide
  modified_base (17)..(17): 2'-OMe-nucleotide
  modified_base (18)..(18): 2'-fluoro-nucleotide
  modified_base (19)..(19): 2'-OMe-nucleotide
  modified_base (20)..(20): 2'-fluoro-nucleotide
  modified_base (21)..(21): 2'-OMe-nucleotide
  modified_base (22)..(22): 2'-fluoro-nucleotide
  modified_base (23)..(23): Inverted nucleotide
ccauacuccaccacugucacagt

SEQ ID NO: 607 - DNA, 23 bp, Artificial Sequence
  source: /note="Description of Artificial Sequence: Synthetic oligonucleotide"
  source: /note="Description of Combined DNA/RNA Molecule: Synthetic oligonucleotide"
  modified_base (1)..(1): 2'-OMe-nucleotide
  modified_base (2)..(2): 2'-OMe-nucleotide
  modified_base (3)..(3): 2'-OMe-nucleotide
  modified_base (4)..(4): 2'-fluoro-nucleotide
  modified_base (5)..(5): 2'-OMe-nucleotide
  modified_base (6)..(6): 2'-fluoro-nucleotide
  modified_base (7)..(7): 2'-OMe-nucleotide
  modified_base (8)..(8): 2'-fluoro-nucleotide
  modified_base (9)..(9): 2'-OMe-nucleotide
  modified_base (10)..(10): 2'-fluoro-nucleotide
  modified_base (11)..(11): 2'-OMe-nucleotide
  modified_base (12)..(12): 2'-fluoro-nucleotide
  modified_base (13)..(13): 2'-OMe-nucleotide
  modified_base (14)..(14): 2'-fluoro-nucleotide
  modified_base (15)..(15): 2'-OMe-nucleotide
  modified_base (16)..(16): 2'-fluoro-nucleotide
  modified_base (17)..(17): 2'-OMe-nucleotide
  modified_base (18)..(18): 2'-fluoro-nucleotide
  modified_base (19)..(19): 2'-OMe-nucleotide
  modified_base (20)..(20): 2'-fluoro-nucleotide
  modified_base (21)..(21): 2'-OMe-nucleotide
  modified_base (22)..(22): 2'-fluoro-nucleotide
  modified_base (23)..(23): Inverted nucleotide
ccacuccaccacugucacaggat

SEQ ID NO: 608 - DNA, 23 bp, Artificial Sequence
  source: /note="Description of Artificial Sequence: Synthetic oligonucleotide"
  source: /note="Description of Combined DNA/RNA Molecule: Synthetic oligonucleotide"
  modified_base (1)..(1): 2'-OMe-nucleotide
  modified_base (2)..(2): 2'-OMe-nucleotide
  modified_base (3)..(3): 2'-OMe-nucleotide
  modified_base (4)..(4): 2'-fluoro-nucleotide
  modified_base (5)..(5): 2'-OMe-nucleotide
  modified_base (6)..(6): 2'-fluoro-nucleotide
  modified_base (7)..(7): 2'-OMe-nucleotide
  modified_base (8)..(8): 2'-fluoro-nucleotide
  modified_base (9)..(9): 2'-OMe-nucleotide
  modified_base (10)..(10): 2'-fluoro-nucleotide
  modified_base (11)..(11): 2'-OMe-nucleotide
  modified_base (12)..(12): 2'-fluoro-nucleotide
  modified_base (13)..(13): 2'-OMe-nucleotide
  modified_base (14)..(14): 2'-fluoro-nucleotide
  modified_base (15)..(15): 2'-OMe-nucleotide
  modified_base (16)..(16): 2'-fluoro-nucleotide
  modified_base (17)..(17): 2'-OMe-nucleotide
  modified_base (18)..(18): 2'-fluoro-nucleotide
  modified_base (19)..(19): 2'-OMe-nucleotide
  modified_base (20)..(20): 2'-fluoro-nucleotide
  modified_base (21)..(21): 2'-OMe-nucleotide
  modified_base (22)..(22): 2'-fluoro-nucleotide
  modified_base (23)..(23): Inverted nucleotide
ccaaggaccugccaagcuuggut

SEQ ID NO: 609 - DNA, 23 bp, Artificial Sequence
  source: /note="Description of Artificial Sequence: Synthetic oligonucleotide"
  source: /note="Description of Combined DNA/RNA Molecule: Synthetic oligonucleotide"
  modified_base (1)..(1): 2'-OMe-nucleotide
  modified_base (2)..(2): 2'-OMe-nucleotide
  modified_base (3)..(3): 2'-OMe-nucleotide
  modified_base (4)..(4): 2'-fluoro-nucleotide
  modified_base (5)..(5): 2'-OMe-nucleotide
  modified_base (6)..(6): 2'-fluoro-nucleotide
  modified_base (7)..(7): 2'-OMe-nucleotide
  modified_base (8)..(8): 2'-fluoro-nucleotide
  modified_base (9)..(9): 2'-OMe-nucleotide
  modified_base (10)..(10): 2'-fluoro-nucleotide
  modified_base (11)..(11): 2'-OMe-nucleotide
  modified_base (12)..(12): 2'-fluoro-nucleotide
  modified_base (13)..(13): 2'-OMe-nucleotide
  modified_base (14)..(14): 2'-fluoro-nucleotide
  modified_base (15)..(15): 2'-OMe-nucleotide
  modified_base (16)..(16): 2'-fluoro-nucleotide
  modified_base (17)..(17): 2'-OMe-nucleotide
  modified_base (18)..(18): 2'-fluoro-nucleotide
  modified_base (19)..(19): 2'-OMe-nucleotide
  modified_base (20)..(20): 2'-fluoro-nucleotide
  modified_base (21)..(21): 2'-OMe-nucleotide
  modified_base (22)..(22): 2'-fluoro-nucleotide
  modified_base (23)..(23): Inverted nucleotide
ccagaccugccaagcuuggucat

SEQ ID NO: 610 - DNA, 23 bp, Artificial Sequence
  source: /note="Description of Artificial Sequence: Synthetic oligonucleotide"
  source: /note="Description of Combined DNA/RNA Molecule: Synthetic oligonucleotide"
  modified_base (1)..(1): 2'-OMe-nucleotide
  modified_base (2)..(2): 2'-OMe-nucleotide
  modified_base (3)..(3): 2'-OMe-nucleotide
  modified_base (4)..(4): 2'-fluoro-nucleotide
  modified_base (5)..(5): 2'-OMe-nucleotide
  modified_base (6)..(6): 2'-fluoro-nucleotide
  modified_base (7)..(7): 2'-OMe-nucleotide
  modified_base (8)..(8): 2'-fluoro-nucleotide
  modified_base (9)..(9): 2'-OMe-nucleotide
  modified_base (10)..(10): 2'-fluoro-nucleotide
  modified_base (11)..(11): 2'-OMe-nucleotide
  modified_base (12)..(12): 2'-fluoro-nucleotide
  modified_base (13)..(13): 2'-OMe-nucleotide
  modified_base (14)..(14): 2'-fluoro-nucleotide
  modified_base (15)..(15): 2'-OMe-nucleotide
  modified_base (16)..(16): 2'-fluoro-nucleotide
  modified_base (17)..(17): 2'-OMe-nucleotide
  modified_base (18)..(18): 2'-fluoro-nucleotide
  modified_base (19)..(19): 2'-OMe-nucleotide
  modified_base (20)..(20): 2'-fluoro-nucleotide
  modified_base (21)..(21): 2'-OMe-nucleotide
  modified_base (22)..(22): 2'-fluoro-nucleotide
  modified_base (23)..(23): Inverted nucleotide
ccaaccugccaagcuuggucaut

SEQ ID NO: 611 - DNA, 23 bp, Artificial Sequence
  source: /note="Description of Artificial Sequence: Synthetic oligonucleotide"
  source: /note="Description of Combined DNA/RNA Molecule: Synthetic oligonucleotide"
  modified_base (1)..(1): 2'-OMe-nucleotide
  modified_base (2)..(2): 2'-OMe-nucleotide
  modified_base (3)..(3): 2'-OMe-nucleotide
  modified_base (4)..(4): 2'-fluoro-nucleotide
  modified_base (5)..(5): 2'-OMe-nucleotide
  modified_base (6)..(6): 2'-fluoro-nucleotide
  modified_base (7)..(7): 2'-OMe-nucleotide
  modified_base (8)..(8): 2'-fluoro-nucleotide
  modified_base (9)..(9): 2'-OMe-nucleotide
  modified_base (10)..(10): 2'-fluoro-nucleotide
  modified_base (11)..(11): 2'-OMe-nucleotide
  modified_base (12)..(12): 2'-fluoro-nucleotide
  modified_base (13)..(13): 2'-OMe-nucleotide
  modified_base (14)..(14): 2'-fluoro-nucleotide
  modified_base (15)..(15): 2'-OMe-nucleotide
  modified_base (16)..(16): 2'-fluoro-nucleotide
  modified_base (17)..(17): 2'-OMe-nucleotide
  modified_base (18)..(18): 2'-fluoro-nucleotide
  modified_base (19)..(19): 2'-OMe-nucleotide
  modified_base (20)..(20): 2'-fluoro-nucleotide
  modified_base (21)..(21): 2'-OMe-nucleotide
  modified_base (22)..(22): 2'-fluoro-nucleotide
  modified_base (23)..(23): Inverted nucleotide
ccaccugccaagcuuggucauct

SEQ ID NO: 612 - DNA, 23 bp, Artificial Sequence
  source: /note="Description of Artificial Sequence: Synthetic oligonucleotide"
  source: /note="Description of Combined DNA/RNA Molecule: Synthetic oligonucleotide"
  modified_base (1)..(1): 2'-OMe-nucleotide
  modified_base (2)..(2): 2'-OMe-nucleotide
  modified_base (3)..(3): 2'-OMe-nucleotide
  modified_base (4)..(4): 2'-fluoro-nucleotide
  modified_base (5)..(5): 2'-OMe-nucleotide
  modified_base (6)..(6): 2'-fluoro-nucleotide
  modified_base (7)..(7): 2'-OMe-nucleotide
  modified_base (8)..(8): 2'-fluoro-nucleotide
  modified_base (9)..(9): 2'-OMe-nucleotide
  modified_base (10)..(10): 2'-fluoro-nucleotide
  modified_base (11)..(11): 2'-OMe-nucleotide
  modified_base (12)..(12): 2'-fluoro-nucleotide
  modified_base (13)..(13): 2'-OMe-nucleotide
  modified_base (14)..(14): 2'-fluoro-nucleotide
  modified_base (15)..(15): 2'-OMe-nucleotide
  modified_base (16)..(16): 2'-fluoro-nucleotide
  modified_base (17)..(17): 2'-OMe-nucleotide
  modified_base (18)..(18): 2'-fluoro-nucleotide
  modified_base (19)..(19): 2'-OMe-nucleotide
  modified_base (20)..(20): 2'-fluoro-nucleotide
  modified_base (21)..(21): 2'-OMe-nucleotide
  modified_base (22)..(22): 2'-fluoro-nucleotide
  modified_base (23)..(23): Inverted nucleotide
ccagccaagcuuggucaucuaut

SEQ ID NO: 613 - DNA, 23 bp, Artificial Sequence
  source: /note="Description of Artificial Sequence: Synthetic oligonucleotide"
  source: /note="Description of Combined DNA/RNA Molecule: Synthetic oligonucleotide"
  modified_base (1)..(1): 2'-OMe-nucleotide
  modified_base (2)..(2): 2'-OMe-nucleotide
  modified_base (3)..(3): 2'-OMe-nucleotide
  modified_base (4)..(4): 2'-fluoro-nucleotide
  modified_base (5)..(5): 2'-OMe-nucleotide
  modified_base (6)..(6): 2'-fluoro-nucleotide
  modified_base (7)..(7): 2'-OMe-nucleotide
  modified_base (8)..(8): 2'-fluoro-nucleotide
  modified_base (9)..(9): 2'-OMe-nucleotide
  modified_base (10)..(10): 2'-fluoro-nucleotide
  modified_base (11)..(11): 2'-OMe-nucleotide
  modified_base (12)..(12): 2'-fluoro-nucleotide
  modified_base (13)..(13): 2'-OMe-nucleotide
  modified_base (14)..(14): 2'-fluoro-nucleotide
  modified_base (15)..(15): 2'-OMe-nucleotide
  modified_base (16)..(16): 2'-fluoro-nucleotide
  modified_base (17)..(17): 2'-OMe-nucleotide
  modified_base (18)..(18): 2'-fluoro-nucleotide
  modified_base (19)..(19): 2'-OMe-nucleotide
  modified_base (20)..(20): 2'-fluoro-nucleotide
  modified_base (21)..(21): 2'-OMe-nucleotide
  modified_base (22)..(22): 2'-fluoro-nucleotide
  modified_base (23)..(23): Inverted nucleotide
ccaccaagcuuggucaucuaugt

SEQ ID NO: 614 - DNA, 23 bp, Artificial Sequence
  source: /note="Description of Artificial Sequence: Synthetic oligonucleotide"
  source: /note="Description of Combined DNA/RNA Molecule: Synthetic oligonucleotide"
  modified_base (1)..(1): 2'-OMe-nucleotide
  modified_base (2)..(2): 2'-OMe-nucleotide
  modified_base (3)..(3): 2'-OMe-nucleotide
  modified_base (4)..(4): 2'-fluoro-nucleotide
  modified_base (5)..(5): 2'-OMe-nucleotide
  modified_base (6)..(6): 2'-fluoro-nucleotide
  modified_base (7)..(7): 2'-OMe-nucleotide
  modified_base (8)..(8): 2'-fluoro-nucleotide
  modified_base (9)..(9): 2'-OMe-nucleotide
  modified_base (10)..(10): 2'-fluoro-nucleotide
  modified_base (11)..(11): 2'-OMe-nucleotide
  modified_base (12)..(12): 2'-fluoro-nucleotide
  modified_base (13)..(13): 2'-OMe-nucleotide
  modified_base (14)..(14): 2'-fluoro-nucleotide
  modified_base (15)..(15): 2'-OMe-nucleotide
  modified_base (16)..(16): 2'-fluoro-nucleotide
  modified_base (17)..(17): 2'-OMe-nucleotide
  modified_base (18)..(18): 2'-fluoro-nucleotide
  modified_base (19)..(19): 2'-OMe-nucleotide
  modified_base (20)..(20): 2'-fluoro-nucleotide
  modified_base (21)..(21): 2'-OMe-nucleotide
  modified_base (22)..(22): 2'-fluoro-nucleotide
  modified_base (23)..(23): Inverted nucleotide
ccacauaauaggaccacagaaat

SEQ ID NO: 615 - DNA, 23 bp, Artificial Sequence
  source: /note="Description of Artificial Sequence: Synthetic oligonucleotide"
  source: /note="Description of Combined DNA/RNA Molecule: Synthetic oligonucleotide"
  modified_base (1)..(1): 2'-OMe-nucleotide
  modified_base (2)..(2): 2'-OMe-nucleotide
  modified_base (3)..(3): 2'-OMe-nucleotide
  modified_base (4)..(4): 2'-fluoro-nucleotide
  modified_base (5)..(5): 2'-OMe-nucleotide
  modified_base (6)..(6): 2'-fluoro-nucleotide
  modified_base (7)..(7): 2'-OMe-nucleotide
  modified_base (8)..(8): 2'-fluoro-nucleotide
  modified_base (9)..(9): 2'-OMe-nucleotide
  modified_base (10)..(10): 2'-fluoro-nucleotide
  modified_base (11)..(11): 2'-OMe-nucleotide
  modified_base (12)..(12): 2'-fluoro-nucleotide
  modified_base (13)..(13): 2'-OMe-nucleotide
  modified_base (14)..(14): 2'-fluoro-nucleotide
  modified_base (15)..(15): 2'-OMe-nucleotide
  modified_base (16)..(16): 2'-fluoro-nucleotide
  modified_base (17)..(17): 2'-OMe-nucleotide
  modified_base (18)..(18): 2'-fluoro-nucleotide
  modified_base (19)..(19): 2'-OMe-nucleotide
  modified_base (20)..(20): 2'-fluoro-nucleotide
  modified_base (21)..(21): 2'-OMe-nucleotide
  modified_base (22)..(22): 2'-fluoro-nucleotide
  modified_base (23)..(23): Inverted nucleotide
ccauaauaggaccacagaaaact

SEQ ID NO: 616 - DNA, 23 bp, Artificial Sequence
  source: /note="Description of Artificial Sequence: Synthetic oligonucleotide"
  source: /note="Description of Combined DNA/RNA Molecule: Synthetic oligonucleotide"
  modified_base (1)..(1): 2'-OMe-nucleotide
  modified_base (2)..(2): 2'-OMe-nucleotide
  modified_base (3)..(3): 2'-OMe-nucleotide
  modified_base (4)..(4): 2'-fluoro-nucleotide
  modified_base (5)..(5): 2'-OMe-nucleotide
  modified_base (6)..(6): 2'-fluoro-nucleotide
  modified_base (7)..(7): 2'-OMe-nucleotide
  modified_base (8)..(8): 2'-fluoro-nucleotide
  modified_base (9)..(9): 2'-OMe-nucleotide
  modified_base (10)..(10): 2'-fluoro-nucleotide
  modified_base (11)..(11): 2'-OMe-nucleotide
  modified_base (12)..(12): 2'-fluoro-nucleotide
  modified_base (13)..(13): 2'-OMe-nucleotide
  modified_base (14)..(14): 2'-fluoro-nucleotide
  modified_base (15)..(15): 2'-OMe-nucleotide
  modified_base (16)..(16): 2'-fluoro-nucleotide
  modified_base (17)..(17): 2'-OMe-nucleotide
  modified_base (18)..(18): 2'-fluoro-nucleotide
  modified_base (19)..(19): 2'-OMe-nucleotide
  modified_base (20)..(20): 2'-fluoro-nucleotide
  modified_base (21)..(21): 2'-OMe-nucleotide
  modified_base (22)..(22): 2'-fluoro-nucleotide
  modified_base (23)..(23): Inverted nucleotide
ccaaauaggaccacagaaaacut

SEQ ID NO: 617 - DNA, 23 bp, Artificial Sequence
  source: /note="Description of Artificial Sequence: Synthetic oligonucleotide"
  source: /note="Description of Combined DNA/RNA Molecule: Synthetic oligonucleotide"
  modified_base (1)..(1): 2'-OMe-nucleotide
  modified_base (2)..(2): 2'-OMe-nucleotide
  modified_base (3)..(3): 2'-OMe-nucleotide
  modified_base (4)..(4): 2'-fluoro-nucleotide
  modified_base (5)..(5): 2'-OMe-nucleotide
  modified_base (6)..(6): 2'-fluoro-nucleotide
  modified_base (7)..(7): 2'-OMe-nucleotide
  modified_base (8)..(8): 2'-fluoro-nucleotide
  modified_base (9)..(9): 2'-OMe-nucleotide
  modified_base (10)..(10): 2'-fluoro-nucleotide
  modified_base (11)..(11): 2'-OMe-nucleotide
  modified_base (12)..(12): 2'-fluoro-nucleotide
  modified_base (13)..(13): 2'-OMe-nucleotide
  modified_base (14)..(14): 2'-fluoro-nucleotide
  modified_base (15)..(15): 2'-OMe-nucleotide
  modified_base (16)..(16): 2'-fluoro-nucleotide
  modified_base (17)..(17): 2'-OMe-nucleotide
  modified_base (18)..(18): 2'-fluoro-nucleotide
  modified_base (19)..(19): 2'-OMe-nucleotide
  modified_base (20)..(20): 2'-fluoro-nucleotide
  modified_base (21)..(21): 2'-OMe-nucleotide
  modified_base (22)..(22): 2'-fluoro-nucleotide
  modified_base (23)..(23): Inverted nucleotide
ccaauaggaccacagaaaacuat

SEQ ID NO: 618 - DNA, 23 bp, Artificial Sequence
  source: /note="Description of Artificial Sequence: Synthetic oligonucleotide"
  source: /note="Description of Combined DNA/RNA Molecule: Synthetic oligonucleotide"
  modified_base (1)..(1): 2'-OMe-nucleotide
  modified_base (2)..(2): 2'-OMe-nucleotide
  modified_base (3)..(3): 2'-OMe-nucleotide
  modified_base (4)..(4): 2'-fluoro-nucleotide
  modified_base (5)..(5): 2'-OMe-nucleotide
  modified_base (6)..(6): 2'-fluoro-nucleotide
  modified_base (7)..(7): 2'-OMe-nucleotide
  modified_base (8)..(8): 2'-fluoro-nucleotide
  modified_base (9)..(9): 2'-OMe-nucleotide
  modified_base (10)..(10): 2'-fluoro-nucleotide
  modified_base (11)..(11): 2'-OMe-nucleotide
  modified_base (12)..(12): 2'-fluoro-nucleotide
  modified_base (13)..(13): 2'-OMe-nucleotide
  modified_base (14)..(14): 2'-fluoro-nucleotide
  modified_base (15)..(15): 2'-OMe-nucleotide
  modified_base (16)..(16): 2'-fluoro-nucleotide
  modified_base (17)..(17): 2'-OMe-nucleotide
  modified_base (18)..(18): 2'-fluoro-nucleotide
  modified_base (19)..(19): 2'-OMe-nucleotide
  modified_base (20)..(20): 2'-fluoro-nucleotide
  modified_base (21)..(21): 2'-OMe-nucleotide
  modified_base (22)..(22): 2'-fluoro-nucleotide
  modified_base (23)..(23): Inverted nucleotide
ccauaggaccacagaaaacuact

SEQ ID NO: 619 - DNA, 23 bp, Artificial Sequence
  source: /note="Description of Artificial Sequence: Synthetic oligonucleotide"
  source: /note="Description of Combined DNA/RNA Molecule: Synthetic oligonucleotide"
  modified_base (1)..(1): 2'-OMe-nucleotide
  modified_base (2)..(2): 2'-OMe-nucleotide
  modified_base (3)..(3): 2'-OMe-nucleotide
  modified_base (4)..(4): 2'-fluoro-nucleotide
  modified_base (5)..(5): 2'-OMe-nucleotide
  modified_base (6)..(6): 2'-fluoro-nucleotide
  modified_base (7)..(7): 2'-OMe-nucleotide
  modified_base (8)..(8): 2'-fluoro-nucleotide
  modified_base (9)..(9): 2'-OMe-nucleotide
  modified_base (10)..(10): 2'-fluoro-nucleotide
  modified_base (11)..(11): 2'-OMe-nucleotide
  modified_base (12)..(12): 2'-fluoro-nucleotide
  modified_base (13)..(13): 2'-OMe-nucleotide
  modified_base (14)..(14): 2'-fluoro-nucleotide
  modified_base (15)..(15): 2'-OMe-nucleotide
  modified_base (16)..(16): 2'-fluoro-nucleotide
  modified_base (17)..(17): 2'-OMe-nucleotide
  modified_base (18)..(18): 2'-fluoro-nucleotide
  modified_base (19)..(19): 2'-OMe-nucleotide
  modified_base (20)..(20): 2'-fluoro-nucleotide
  modified_base (21)..(21): 2'-OMe-nucleotide
  modified_base (22)..(22): 2'-fluoro-nucleotide
  modified_base (23)..(23): Inverted nucleotide
ccaaaaugcuggcuugaucaugt

SEQ ID NO: 620 - DNA, 23 bp, Artificial Sequence
  source: /note="Description of Artificial Sequence: Synthetic oligonucleotide"
  source: /note="Description of Combined DNA/RNA Molecule: Synthetic oligonucleotide"
  modified_base (1)..(1): 2'-OMe-nucleotide
  modified_base (2)..(2): 2'-OMe-nucleotide
  modified_base (3)..(3): 2'-OMe-nucleotide
  modified_base (4)..(4): 2'-fluoro-nucleotide
  modified_base (5)..(5): 2'-OMe-nucleotide
  modified_base (6)..(6): 2'-fluoro-nucleotide
  modified_base (7)..(7): 2'-OMe-nucleotide
  modified_base (8)..(8): 2'-fluoro-nucleotide
  modified_base (9)..(9): 2'-OMe-nucleotide
  modified_base (10)..(10): 2'-fluoro-nucleotide
  modified_base (11)..(11): 2'-OMe-nucleotide
  modified_base (12)..(12): 2'-fluoro-nucleotide
  modified_base (13)..(13): 2'-OMe-nucleotide
  modified_base (14)..(14): 2'-fluoro-nucleotide
  modified_base (15)..(15): 2'-OMe-nucleotide
  modified_base (16)..(16): 2'-fluoro-nucleotide
  modified_base (17)..(17): 2'-OMe-nucleotide
  modified_base (18)..(18): 2'-fluoro-nucleotide
  modified_base (19)..(19): 2'-OMe-nucleotide
  modified_base (20)..(20): 2'-fluoro-nucleotide
  modified_base (21)..(21): 2'-OMe-nucleotide
  modified_base (22)..(22): 2'-fluoro-nucleotide
  modified_base (23)..(23): Inverted nucleotide
ccauggcuugaucaugaacuact

SEQ ID NO: 621 - DNA, 23 bp, Artificial Sequence
  source: /note="Description of Artificial Sequence: Synthetic oligonucleotide"
  source: /note="Description of Combined DNA/RNA Molecule: Synthetic oligonucleotide"
  modified_base (1)..(1): 2'-OMe-nucleotide
  modified_base (2)..(2): 2'-OMe-nucleotide
  modified_base (3)..(3): 2'-OMe-nucleotide
  modified_base (4)..(4): 2'-fluoro-nucleotide
  modified_base (5)..(5): 2'-OMe-nucleotide
  modified_base (6)..(6): 2'-fluoro-nucleotide
  modified_base (7)..(7): 2'-OMe-nucleotide
  modified_base (8)..(8): 2'-fluoro-nucleotide
  modified_base (9)..(9): 2'-OMe-nucleotide
  modified_base (10)..(10): 2'-fluoro-nucleotide
  modified_base (11)..(11): 2'-OMe-nucleotide
  modified_base (12)..(12): 2'-fluoro-nucleotide
  modified_base (13)..(13): 2'-OMe-nucleotide
  modified_base (14)..(14): 2'-fluoro-nucleotide
  modified_base (15)..(15): 2'-OMe-nucleotide
  modified_base (16)..(16): 2'-fluoro-nucleotide
  modified_base (17)..(17): 2'-OMe-nucleotide
  modified_base (18)..(18): 2'-fluoro-nucleotide
  modified_base (19)..(19): 2'-OMe-nucleotide
  modified_base (20)..(20): 2'-fluoro-nucleotide
  modified_base (21)..(21): 2'-OMe-nucleotide
  modified_base (22)..(22): 2'-fluoro-nucleotide
  modified_base (23)..(23): Inverted nucleotide
ccaggcuugaucaugaacuacut

SEQ ID NO: 622 - DNA, 23 bp, Artificial Sequence
  source: /note="Description of Artificial Sequence: Synthetic oligonucleotide"
  source: /note="Description of Combined DNA/RNA Molecule: Synthetic oligonucleotide"
  modified_base (1)..(1): 2'-OMe-nucleotide
  modified_base (2)..(2): 2'-OMe-nucleotide
  modified_base (3)..(3): 2'-OMe-nucleotide
  modified_base (4)..(4): 2'-fluoro-nucleotide
  modified_base (5)..(5): 2'-OMe-nucleotide
  modified_base (6)..(6): 2'-fluoro-nucleotide
  modified_base (7)..(7): 2'-OMe-nucleotide
  modified_base (8)..(8): 2'-fluoro-nucleotide
  modified_base (9)..(9): 2'-OMe-nucleotide
  modified_base (10)..(10): 2'-fluoro-nucleotide
  modified_base (11)..(11): 2'-OMe-nucleotide
  modified_base (12)..(12): 2'-fluoro-nucleotide
  modified_base (13)..(13): 2'-OMe-nucleotide
  modified_base (14)..(14): 2'-fluoro-nucleotide
  modified_base (15)..(15): 2'-OMe-nucleotide
  modified_base (16)..(16): 2'-fluoro-nucleotide
  modified_base (17)..(17): 2'-OMe-nucleotide
  modified_base (18)..(18): 2'-fluoro-nucleotide
  modified_base (19)..(19): 2'-OMe-nucleotide
  modified_base (20)..(20): 2'-fluoro-nucleotide
  modified_base (21)..(21): 2'-OMe-nucleotide
  modified_base (22)..(22): 2'-fluoro-nucleotide
  modified_base (23)..(23): Inverted nucleotide
ccaagcuccuuauuguuauacgt

SEQ ID NO: 623 - DNA, 23 bp, Artificial Sequence
  source: /note="Description of Artificial Sequence: Synthetic oligonucleotide"
  source: /note="Description of Combined DNA/RNA Molecule: Synthetic oligonucleotide"
  modified_base (1)..(1): 2'-OMe-nucleotide
  modified_base (2)..(2): 2'-OMe-nucleotide
  modified_base (3)..(3): 2'-OMe-nucleotide
  modified_base (4)..(4): 2'-fluoro-nucleotide
  modified_base (5)..(5): 2'-OMe-nucleotide
  modified_base (6)..(6): 2'-fluoro-nucleotide
  modified_base (7)..(7): 2'-OMe-nucleotide
  modified_base (8)..(8): 2'-fluoro-nucleotide
  modified_base (9)..(9): 2'-OMe-nucleotide
  modified_base (10)..(10): 2'-fluoro-nucleotide
  modified_base (11)..(11): 2'-OMe-nucleotide
  modified_base (12)..(12): 2'-fluoro-nucleotide
  modified_base (13)..(13): 2'-OMe-nucleotide
  modified_base (14)..(14): 2'-fluoro-nucleotide
  modified_base (15)..(15): 2'-OMe-nucleotide
  modified_base (16)..(16): 2'-fluoro-nucleotide
  modified_base (17)..(17): 2'-OMe-nucleotide
  modified_base (18)..(18): 2'-fluoro-nucleotide
  modified_base (19)..(19): 2'-OMe-nucleotide
  modified_base (20)..(20): 2'-fluoro-nucleotide
  modified_base (21)..(21): 2'-OMe-nucleotide
  modified_base (22)..(22): 2'-fluoro-nucleotide
  modified_base (23)..(23): Inverted nucleotide
ccagcuccuuauuguuauacgat

SEQ ID NO: 624 - DNA, 23 bp, Artificial Sequence
  source: /note="Description of Artificial Sequence: Synthetic oligonucleotide"
  source: /note="Description of Combined DNA/RNA Molecule: Synthetic oligonucleotide"
  modified_base (1)..(1): 2'-OMe-nucleotide
  modified_base (2)..(2): 2'-OMe-nucleotide
  modified_base (3)..(3): 2'-OMe-nucleotide
  modified_base (4)..(4): 2'-fluoro-nucleotide
  modified_base (5)..(5): 2'-OMe-nucleotide
  modified_base (6)..(6): 2'-fluoro-nucleotide
  modified_base (7)..(7): 2'-OMe-nucleotide
  modified_base (8)..(8): 2'-fluoro-nucleotide
  modified_base (9)..(9): 2'-OMe-nucleotide
  modified_base (10)..(10): 2'-fluoro-nucleotide
  modified_base (11)..(11): 2'-OMe-nucleotide
  modified_base (12)..(12): 2'-fluoro-nucleotide
  modified_base (13)..(13): 2'-OMe-nucleotide
  modified_base (14)..(14): 2'-fluoro-nucleotide
  modified_base (15)..(15): 2'-OMe-nucleotide
  modified_base (16)..(16): 2'-fluoro-nucleotide
  modified_base (17)..(17): 2'-OMe-nucleotide
  modified_base (18)..(18): 2'-fluoro-nucleotide
  modified_base (19)..(19): 2'-OMe-nucleotide
  modified_base (20)..(20): 2'-fluoro-nucleotide
  modified_base (21)..(21): 2'-OMe-nucleotide
  modified_base (22)..(22): 2'-fluoro-nucleotide
  modified_base (23)..(23): Inverted nucleotide
ccaaguacugcaaccugacgcat

SEQ ID NO: 625 - DNA, 23 bp, Artificial Sequence
  source: /note="Description of Artificial Sequence: Synthetic oligonucleotide"
  source: /note="Description of Combined DNA/RNA Molecule: Synthetic oligonucleotide"
  modified_base (1)..(1): 2'-OMe-nucleotide
  modified_base (2)..(2): 2'-OMe-nucleotide
  modified_base (3)..(3): 2'-OMe-nucleotide
  modified_base (4)..(4): 2'-fluoro-nucleotide
  modified_base (5)..(5): 2'-OMe-nucleotide
  modified_base (6)..(6): 2'-fluoro-nucleotide
  modified_base (7)..(7): 2'-OMe-nucleotide
  modified_base (8)..(8): 2'-fluoro-nucleotide
  modified_base (9)..(9): 2'-OMe-nucleotide
  modified_base (10)..(10): 2'-fluoro-nucleotide
  modified_base (11)..(11): 2'-OMe-nucleotide
  modified_base (12)..(12): 2'-fluoro-nucleotide
  modified_base (13)..(13): 2'-OMe-nucleotide
  modified_base (14)..(14): 2'-fluoro-nucleotide
  modified_base (15)..(15): 2'-OMe-nucleotide
  modified_base (16)..(16): 2'-fluoro-nucleotide
  modified_base (17)..(17): 2'-OMe-nucleotide
  modified_base (18)..(18): 2'-fluoro-nucleotide
  modified_base (19)..(19): 2'-OMe-nucleotide
  modified_base (20)..(20): 2'-fluoro-nucleotide
  modified_base (21)..(21): 2'-OMe-nucleotide
  modified_base (22)..(22): 2'-fluoro-nucleotide
  modified_base (23)..(23): Inverted nucleotide
ccaguacugcaaccugacgcaat

SEQ ID NO: 626 - DNA, 23 bp, Artificial Sequence
  source: /note="Description of Artificial Sequence: Synthetic oligonucleotide"
  source: /note="Description of Combined DNA/RNA Molecule: Synthetic oligonucleotide"
  modified_base (1)..(1): 2'-OMe-nucleotide
  modified_base (2)..(2): 2'-OMe-nucleotide
  modified_base (3)..(3): 2'-OMe-nucleotide
  modified_base (4)..(4): 2'-fluoro-nucleotide
  modified_base (5)..(5): 2'-OMe-nucleotide
  modified_base (6)..(6): 2'-fluoro-nucleotide
  modified_base (7)..(7): 2'-OMe-nucleotide
  modified_base (8)..(8): 2'-fluoro-nucleotide
  modified_base (9)..(9): 2'-OMe-nucleotide
  modified_base (10)..(10): 2'-fluoro-nucleotide
  modified_base (11)..(11): 2'-OMe-nucleotide
  modified_base (12)..(12): 2'-fluoro-nucleotide
  modified_base (13)..(13): 2'-OMe-nucleotide
  modified_base (14)..(14): 2'-fluoro-nucleotide
  modified_base (15)..(15): 2'-OMe-nucleotide
  modified_base (16)..(16): 2'-fluoro-nucleotide
  modified_base (17)..(17): 2'-OMe-nucleotide
  modified_base (18)..(18): 2'-fluoro-nucleotide
  modified_base (19)..(19): 2'-OMe-nucleotide
  modified_base (20)..(20): 2'-fluoro-nucleotide
  modified_base (21)..(21): 2'-OMe-nucleotide
  modified_base (22)..(22): 2'-fluoro-nucleotide
  modified_base (23)..(23): Inverted nucleotide
ccauacugcaaccugacgcaaut

SEQ ID NO: 627 - DNA, 23 bp, Artificial Sequence
  source: /note="Description of Artificial Sequence: Synthetic oligonucleotide"
  source: /note="Description of Combined DNA/RNA Molecule: Synthetic oligonucleotide"
  modified_base (1)..(1): 2'-OMe-nucleotide
  modified_base (2)..(2): 2'-OMe-nucleotide
  modified_base (3)..(3): 2'-OMe-nucleotide
  modified_base (4)..(4): 2'-fluoro-nucleotide
  modified_base (5)..(5): 2'-OMe-nucleotide
  modified_base (6)..(6): 2'-fluoro-nucleotide
  modified_base (7)..(7): 2'-OMe-nucleotide
  modified_base (8)..(8): 2'-fluoro-nucleotide
  modified_base (9)..(9): 2'-OMe-nucleotide
  modified_base (10)..(10): 2'-fluoro-nucleotide
  modified_base (11)..(11): 2'-OMe-nucleotide
  modified_base (12)..(12): 2'-fluoro-nucleotide
  modified_base (13)..(13): 2'-OMe-nucleotide
  modified_base (14)..(14): 2'-fluoro-nucleotide
  modified_base (15)..(15): 2'-OMe-nucleotide
  modified_base (16)..(16): 2'-fluoro-nucleotide
  modified_base (17)..(17): 2'-OMe-nucleotide
  modified_base (18)..(18): 2'-fluoro-nucleotide
  modified_base (19)..(19): 2'-OMe-nucleotide
  modified_base (20)..(20): 2'-fluoro-nucleotide
  modified_base (21)..(21): 2'-OMe-nucleotide
  modified_base (22)..(22): 2'-fluoro-nucleotide
  modified_base (23)..(23): Inverted nucleotide
ccaugcaaccugacgcaaugcut

SEQ ID NO: 628 - DNA, 23 bp, Artificial Sequence
  source: /note="Description of Artificial Sequence: Synthetic oligonucleotide"
  source: /note="Description of Combined DNA/RNA Molecule: Synthetic oligonucleotide"
  modified_base (1)..(1): 2'-OMe-nucleotide
  modified_base (2)..(2): 2'-OMe-nucleotide
  modified_base (3)..(3): 2'-OMe-nucleotide
  modified_base (4)..(4): 2'-fluoro-nucleotide
  modified_base (5)..(5): 2'-OMe-nucleotide
  modified_base (6)..(6): 2'-fluoro-nucleotide
  modified_base (7)..(7): 2'-OMe-nucleotide
  modified_base (8)..(8): 2'-fluoro-nucleotide
  modified_base (9)..(9): 2'-OMe-nucleotide
  modified_base (10)..(10): 2'-fluoro-nucleotide
  modified_base (11)..(11): 2'-OMe-nucleotide
  modified_base (12)..(12): 2'-fluoro-nucleotide
  modified_base (13)..(13): 2'-OMe-nucleotide
  modified_base (14)..(14): 2'-fluoro-nucleotide
  modified_base (15)..(15): 2'-OMe-nucleotide
  modified_base (16)..(16): 2'-fluoro-nucleotide
  modified_base (17)..(17): 2'-OMe-nucleotide
  modified_base (18)..(18): 2'-fluoro-nucleotide
  modified_base (19)..(19): 2'-OMe-nucleotide
  modified_base (20)..(20): 2'-fluoro-nucleotide
  modified_base (21)..(21): 2'-OMe-nucleotide
  modified_base (22)..(22): 2'-fluoro-nucleotide
  modified_base (23)..(23): Inverted nucleotide
ccagcaaccugacgcaaugcuct

SEQ ID NO: 629 - DNA, 23 bp, Artificial Sequence
  source: /note="Description of Artificial Sequence: Synthetic oligonucleotide"
  source: /note="Description of Combined DNA/RNA Molecule: Synthetic oligonucleotide"
  modified_base (1)..(1): 2'-OMe-nucleotide
  modified_base (2)..(2): 2'-OMe-nucleotide
  modified_base (3)..(3): 2'-OMe-nucleotide
  modified_base (4)..(4): 2'-fluoro-nucleotide
  modified_base (5)..(5): 2'-OMe-nucleotide
  modified_base (6)..(6): 2'-fluoro-nucleotide
  modified_base (7)..(7): 2'-OMe-nucleotide
  modified_base (8)..(8): 2'-fluoro-nucleotide
  modified_base (9)..(9): 2'-OMe-nucleotide
  modified_base (10)..(10): 2'-fluoro-nucleotide
  modified_base (11)..(11): 2'-OMe-nucleotide
  modified_base (12)..(12): 2'-fluoro-nucleotide
  modified_base (13)..(13): 2'-OMe-nucleotide
  modified_base (14)..(14): 2'-fluoro-nucleotide
  modified_base (15)..(15): 2'-OMe-nucleotide
  modified_base (16)..(16): 2'-fluoro-nucleotide
  modified_base (17)..(17): 2'-OMe-nucleotide
  modified_base (18)..(18): 2'-fluoro-nucleotide
  modified_base (19)..(19): 2'-OMe-nucleotide
  modified_base (20)..(20): 2'-fluoro-nucleotide
  modified_base (21)..(21): 2'-OMe-nucleotide
  modified_base (22)..(22): 2'-fluoro-nucleotide
  modified_base (23)..(23): Inverted nucleotide
ccacaaccugacgcaaugcucat

SEQ ID NO: 630 - DNA, 23 bp, Artificial Sequence
  source: /note="Description of Artificial Sequence: Synthetic oligonucleotide"
  source: /note="Description of Combined DNA/RNA Molecule: Synthetic oligonucleotide"
  modified_base (1)..(1): 2'-OMe-nucleotide
  modified_base (2)..(2): 2'-OMe-nucleotide
  modified_base (3)..(3): 2'-OMe-nucleotide
  modified_base (4)..(4): 2'-fluoro-nucleotide
  modified_base (5)..(5): 2'-OMe-nucleotide
  modified_base (6)..(6): 2'-fluoro-nucleotide
  modified_base (7)..(7): 2'-OMe-nucleotide
  modified_base (8)..(8): 2'-fluoro-nucleotide
  modified_base (9)..(9): 2'-OMe-nucleotide
  modified_base (10)..(10): 2'-fluoro-nucleotide
  modified_base (11)..(11): 2'-OMe-nucleotide
  modified_base (12)..(12): 2'-fluoro-nucleotide
  modified_base (13)..(13): 2'-OMe-nucleotide
  modified_base (14)..(14): 2'-fluoro-nucleotide
  modified_base (15)..(15): 2'-OMe-nucleotide
  modified_base (16)..(16): 2'-fluoro-nucleotide
  modified_base (17)..(17): 2'-OMe-nucleotide
  modified_base (18)..(18): 2'-fluoro-nucleotide
  modified_base (19)..(19): 2'-OMe-nucleotide
  modified_base (20)..(20): 2'-fluoro-nucleotide
  modified_base (21)..(21): 2'-OMe-nucleotide
  modified_base (22)..(22): 2'-fluoro-nucleotide
  modified_base (23)..(23): Inverted nucleotide
ccaaaccugacgcaaugcucagt

SEQ ID NO: 631 - DNA, 23 bp, Artificial Sequence
  source: /note="Description of Artificial Sequence: Synthetic oligonucleotide"
  source: /note="Description of Combined DNA/RNA Molecule: Synthetic oligonucleotide"
  modified_base (1)..(1): 2'-OMe-nucleotide
  modified_base (2)..(2): 2'-OMe-nucleotide
  modified_base (3)..(3): 2'-OMe-nucleotide
  modified_base (4)..(4): 2'-fluoro-nucleotide
  modified_base (5)..(5): 2'-OMe-nucleotide
  modified_base (6)..(6): 2'-fluoro-nucleotide
  modified_base (7)..(7): 2'-OMe-nucleotide
  modified_base (8)..(8): 2'-fluoro-nucleotide
  modified_base (9)..(9): 2'-OMe-nucleotide
  modified_base (10)..(10): 2'-fluoro-nucleotide
  modified_base (11)..(11): 2'-OMe-nucleotide
  modified_base (12)..(12): 2'-fluoro-nucleotide
  modified_base (13)..(13): 2'-OMe-nucleotide
  modified_base (14)..(14): 2'-fluoro-nucleotide
  modified_base (15)..(15): 2'-OMe-nucleotide
  modified_base (16)..(16): 2'-fluoro-nucleotide
  modified_base (17)..(17): 2'-OMe-nucleotide
  modified_base (18)..(18): 2'-fluoro-nucleotide
  modified_base (19)..(19): 2'-OMe-nucleotide
  modified_base (20)..(20): 2'-fluoro-nucleotide
  modified_base (21)..(21): 2'-OMe-nucleotide
  modified_base (22)..(22): 2'-fluoro-nucleotide
  modified_base (23)..(23): Inverted nucleotide
ccaaccugacgcaaugcucagat

SEQ ID NO: 632 - DNA, 23 bp, Artificial Sequence
  source: /note="Description of Artificial Sequence: Synthetic oligonucleotide"
  source: /note="Description of Combined DNA/RNA Molecule: Synthetic oligonucleotide"
  modified_base (1)..(1): 2'-OMe-nucleotide
  modified_base (2)..(2): 2'-OMe-nucleotide
  modified_base (3)..(3): 2'-OMe-nucleotide
  modified_base (4)..(4): 2'-fluoro-nucleotide
  modified_base (5)..(5): 2'-OMe-nucleotide
  modified_base (6)..(6): 2'-fluoro-nucleotide
  modified_base (7)..(7): 2'-OMe-nucleotide
  modified_base (8)..(8): 2'-fluoro-nucleotide
  modified_base (9)..(9): 2'-OMe-nucleotide
  modified_base (10)..(10): 2'-fluoro-nucleotide
  modified_base (11)..(11): 2'-OMe-nucleotide
  modified_base (12)..(12): 2'-fluoro-nucleotide
  modified_base (13)..(13): 2'-OMe-nucleotide
  modified_base (14)..(14): 2'-fluoro-nucleotide
  modified_base (15)..(15): 2'-OMe-nucleotide
  modified_base (16)..(16): 2'-fluoro-nucleotide
  modified_base (17)..(17): 2'-OMe-nucleotide
  modified_base (18)..(18): 2'-fluoro-nucleotide
  modified_base (19)..(19): 2'-OMe-nucleotide
  modified_base (20)..(20): 2'-fluoro-nucleotide
  modified_base (21)..(21): 2'-OMe-nucleotide
  modified_base (22)..(22): 2'-fluoro-nucleotide
  modified_base (23)..(23): Inverted nucleotide
ccaccugacgcaaugcucagact

SEQ ID NO: 633 - DNA, 23 bp, Artificial Sequence
  source: /note="Description of Artificial Sequence: Synthetic oligonucleotide"
  source: /note="Description of Combined DNA/RNA Molecule: Synthetic oligonucleotide"
  modified_base (1)..(1): 2'-OMe-nucleotide
  modified_base (2)..(2): 2'-OMe-nucleotide
  modified_base (3)..(3): 2'-OMe-nucleotide
  modified_base (4)..(4): 2'-fluoro-nucleotide
  modified_base (5)..(5): 2'-OMe-nucleotide
  modified_base (6)..(6): 2'-fluoro-nucleotide
  modified_base (7)..(7): 2'-OMe-nucleotide
  modified_base (8)..(8): 2'-fluoro-nucleotide
  modified_base (9)..(9): 2'-OMe-nucleotide
  modified_base (10)..(10): 2'-fluoro-nucleotide
  modified_base (11)..(11): 2'-OMe-nucleotide
  modified_base (12)..(12): 2'-fluoro-nucleotide
  modified_base (13)..(13): 2'-OMe-nucleotide
  modified_base (14)..(14): 2'-fluoro-nucleotide
  modified_base (15)..(15): 2'-OMe-nucleotide
  modified_base (16)..(16): 2'-fluoro-nucleotide
  modified_base (17)..(17): 2'-OMe-nucleotide
  modified_base (18)..(18): 2'-fluoro-nucleotide
  modified_base (19)..(19): 2'-OMe-nucleotide
  modified_base (20)..(20): 2'-fluoro-nucleotide
  modified_base (21)..(21): 2'-OMe-nucleotide
  modified_base (22)..(22): 2'-fluoro-nucleotide
  modified_base (23)..(23): Inverted nucleotide
ccacugacgcaaugcucagacgt

SEQ ID NO: 634 - DNA, 23 bp, Artificial Sequence
  source: /note="Description of Artificial Sequence: Synthetic oligonucleotide"
  source: /note="Description of Combined DNA/RNA Molecule: Synthetic oligonucleotide"
  modified_base (1)..(1): 2'-OMe-nucleotide
  modified_base (2)..(2): 2'-OMe-nucleotide
  modified_base (3)..(3): 2'-OMe-nucleotide
  modified_base (4)..(4): 2'-fluoro-nucleotide
  modified_base (5)..(5): 2'-OMe-nucleotide
  modified_base (6)..(6): 2'-fluoro-nucleotide
  modified_base (7)..(7): 2'-OMe-nucleotide
  modified_base (8)..(8): 2'-fluoro-nucleotide
  modified_base (9)..(9): 2'-OMe-nucleotide
  modified_base (10)..(10): 2'-fluoro-nucleotide
  modified_base (11)..(11): 2'-OMe-nucleotide
  modified_base (12)..(12): 2'-fluoro-nucleotide
  modified_base (13)..(13): 2'-OMe-nucleotide
  modified_base (14)..(14): 2'-fluoro-nucleotide
  modified_base (15)..(15): 2'-OMe-nucleotide
  modified_base (16)..(16): 2'-fluoro-nucleotide
  modified_base (17)..(17): 2'-OMe-nucleotide
  modified_base (18)..(18): 2'-fluoro-nucleotide
  modified_base (19)..(19): 2'-OMe-nucleotide
  modified_base (20)..(20): 2'-fluoro-nucleotide
  modified_base (21)..(21): 2'-OMe-nucleotide
  modified_base (22)..(22): 2'-fluoro-nucleotide
  modified_base (23)..(23): Inverted nucleotide
ccaugacgcaaugcucagacgct

SEQ ID NO: 635 - DNA, 23 bp, Artificial Sequence
  source: /note="Description of Artificial Sequence: Synthetic oligonucleotide"
  source: /note="Description of Combined DNA/RNA Molecule: Synthetic oligonucleotide"
  modified_base (1)..(1): 2'-OMe-nucleotide
  modified_base (2)..(2): 2'-OMe-nucleotide
  modified_base (3)..(3): 2'-OMe-nucleotide
  modified_base (4)..(4): 2'-fluoro-nucleotide
  modified_base (5)..(5): 2'-OMe-nucleotide
  modified_base (6)..(6): 2'-fluoro-nucleotide
  modified_base (7)..(7): 2'-OMe-nucleotide
  modified_base (8)..(8): 2'-fluoro-nucleotide
  modified_base (9)..(9): 2'-OMe-nucleotide
  modified_base (10)..(10): 2'-fluoro-nucleotide
  modified_base (11)..(11): 2'-OMe-nucleotide
  modified_base (12)..(12): 2'-fluoro-nucleotide
  modified_base (13)..(13): 2'-OMe-nucleotide
  modified_base (14)..(14): 2'-fluoro-nucleotide
  modified_base (15)..(15): 2'-OMe-nucleotide
  modified_base (16)..(16): 2'-fluoro-nucleotide
  modified_base (17)..(17): 2'-OMe-nucleotide
  modified_base (18)..(18): 2'-fluoro-nucleotide
  modified_base (19)..(19): 2'-OMe-nucleotide
  modified_base (20)..(20): 2'-fluoro-nucleotide
  modified_base (21)..(21): 2'-OMe-nucleotide
  modified_base (22)..(22): 2'-fluoro-nucleotide
  modified_base (23)..(23): Inverted nucleotide
ccauccgacuguuaccccgguut

SEQ ID NO: 636 - DNA, 23 bp, Artificial Sequence
  source: /note="Description of Artificial Sequence: Synthetic oligonucleotide"
  source: /note="Description of Combined DNA/RNA Molecule: Synthetic oligonucleotide"
  modified_base (1)..(1): 2'-OMe-nucleotide
  modified_base (2)..(2): 2'-OMe-nucleotide
  modified_base (3)..(3): 2'-OMe-nucleotide
  modified_base (4)..(4): 2'-fluoro-nucleotide
  modified_base (5)..(5): 2'-OMe-nucleotide
  modified_base (6)..(6): 2'-fluoro-nucleotide
  modified_base (7)..(7): 2'-OMe-nucleotide
  modified_base (8)..(8): 2'-fluoro-nucleotide
  modified_base (9)..(9): 2'-OMe-nucleotide
  modified_base (10)..(10): 2'-fluoro-nucleotide
  modified_base (11)..(11): 2'-OMe-nucleotide
  modified_base (12)..(12): 2'-fluoro-nucleotide
  modified_base (13)..(13): 2'-OMe-nucleotide
  modified_base (14)..(14): 2'-fluoro-nucleotide
  modified_base (15)..(15): 2'-OMe-nucleotide
  modified_base (16)..(16): 2'-fluoro-nucleotide
  modified_base (17)..(17): 2'-OMe-nucleotide
  modified_base (18)..(18): 2'-fluoro-nucleotide
  modified_base (19)..(19): 2'-OMe-nucleotide
  modified_base (20)..(20): 2'-fluoro-nucleotide
  modified_base (21)..(21): 2'-OMe-nucleotide
  modified_base (22)..(22): 2'-fluoro-nucleotide
  modified_base (23)..(23): Inverted nucleotide
ccaacuguuaccccgguuccaat

SEQ ID NO: 637 - DNA, 23 bp, Artificial Sequence
  source: /note="Description of Artificial Sequence: Synthetic oligonucleotide"
  source: /note="Description of Combined DNA/RNA Molecule: Synthetic oligonucleotide"
  modified_base (1)..(1): 2'-OMe-nucleotide
  modified_base (2)..(2): 2'-OMe-nucleotide
  modified_base (3)..(3): 2'-OMe-nucleotide
  modified_base (4)..(4): 2'-fluoro-nucleotide
  modified_base (5)..(5): 2'-OMe-nucleotide
  modified_base (6)..(6): 2'-fluoro-nucleotide
  modified_base (7)..(7): 2'-OMe-nucleotide
  modified_base (8)..(8): 2'-fluoro-nucleotide
  modified_base (9)..(9): 2'-OMe-nucleotide
  modified_base (10)..(10): 2'-fluoro-nucleotide
  modified_base (11)..(11): 2'-OMe-nucleotide
  modified_base (12)..(12): 2'-fluoro-nucleotide
  modified_base (13)..(13): 2'-OMe-nucleotide
  modified_base (14)..(14): 2'-fluoro-nucleotide
  modified_base (15)..(15): 2'-OMe-nucleotide
  modified_base (16)..(16): 2'-fluoro-nucleotide
  modified_base (17)..(17): 2'-OMe-nucleotide
  modified_base (18)..(18): 2'-fluoro-nucleotide
  modified_base (19)..(19): 2'-OMe-nucleotide
  modified_base (20)..(20): 2'-fluoro-nucleotide
  modified_base (21)..(21): 2'-OMe-nucleotide
  modified_base (22)..(22): 2'-fluoro-nucleotide
  modified_base (23)..(23): Inverted nucleotide
ccacuguuaccccgguuccaagt

SEQ ID NO: 638 - DNA, 23 bp, Artificial Sequence
  source: /note="Description of Artificial Sequence: Synthetic oligonucleotide"
  source: /note="Description of Combined DNA/RNA Molecule: Synthetic oligonucleotide"
  modified_base (1)..(1): 2'-OMe-nucleotide
  modified_base (2)..(2): 2'-OMe-nucleotide
  modified_base (3)..(3): 2'-OMe-nucleotide
  modified_base (4)..(4): 2'-fluoro-nucleotide
  modified_base (5)..(5): 2'-OMe-nucleotide
  modified_base (6)..(6): 2'-fluoro-nucleotide
  modified_base (7)..(7): 2'-OMe-nucleotide
  modified_base (8)..(8): 2'-fluoro-nucleotide
  modified_base (9)..(9): 2'-OMe-nucleotide
  modified_base (10)..(10): 2'-fluoro-nucleotide
  modified_base (11)..(11): 2'-OMe-nucleotide
  modified_base (12)..(12): 2'-fluoro-nucleotide
  modified_base (13)..(13): 2'-OMe-nucleotide
  modified_base (14)..(14): 2'-fluoro-nucleotide
  modified_base (15)..(15): 2'-OMe-nucleotide
  modified_base (16)..(16): 2'-fluoro-nucleotide
  modified_base (17)..(17): 2'-OMe-nucleotide
  modified_base (18)..(18): 2'-fluoro-nucleotide
  modified_base (19)..(19): 2'-OMe-nucleotide
  modified_base (20)..(20): 2'-fluoro-nucleotide
  modified_base (21)..(21): 2'-OMe-nucleotide
  modified_base (22)..(22): 2'-fluoro-nucleotide
  modified_base (23)..(23): Inverted nucleotide
ccauguuaccccgguuccaagct

SEQ ID NO: 639 - DNA, 23 bp, Artificial Sequence
  source: /note="Description of Artificial Sequence: Synthetic oligonucleotide"
  source: /note="Description of Combined DNA/RNA Molecule: Synthetic oligonucleotide"
  modified_base (1)..(1): 2'-OMe-nucleotide
  modified_base (2)..(2): 2'-OMe-nucleotide
  modified_base (3)..(3): 2'-OMe-nucleotide
  modified_base (4)..(4): 2'-fluoro-nucleotide
  modified_base (5)..(5): 2'-OMe-nucleotide
  modified_base (6)..(6): 2'-fluoro-nucleotide
  modified_base (7)..(7): 2'-OMe-nucleotide
  modified_base (8)..(8): 2'-fluoro-nucleotide
  modified_base (9)..(9): 2'-OMe-nucleotide
  modified_base (10)..(10): 2'-fluoro-nucleotide
  modified_base (11)..(11): 2'-OMe-nucleotide
  modified_base (12)..(12): 2'-fluoro-nucleotide
  modified_base (13)..(13): 2'-OMe-nucleotide
  modified_base (14)..(14): 2'-fluoro-nucleotide
  modified_base (15)..(15): 2'-OMe-nucleotide
  modified_base (16)..(16): 2'-fluoro-nucleotide
  modified_base (17)..(17): 2'-OMe-nucleotide
  modified_base (18)..(18): 2'-fluoro-nucleotide
  modified_base (19)..(19): 2'-OMe-nucleotide
  modified_base (20)..(20): 2'-fluoro-nucleotide
  modified_base (21)..(21): 2'-OMe-nucleotide
  modified_base (22)..(22): 2'-fluoro-nucleotide
  modified_base (23)..(23): Inverted nucleotide
ccauuaccccgguuccaagccut

SEQ ID NO: 640 - DNA, 23 bp, Artificial Sequence
  source: /note="Description of Artificial Sequence: Synthetic oligonucleotide"
  source: /note="Description of Combined DNA/RNA Molecule: Synthetic oligonucleotide"
  modified_base (1)..(1): 2'-OMe-nucleotide
  modified_base (2)..(2): 2'-OMe-nucleotide
  modified_base (3)..(3): 2'-OMe-nucleotide
  modified_base (4)..(4): 2'-fluoro-nucleotide
  modified_base (5)..(5): 2'-OMe-nucleotide
  modified_base (6)..(6): 2'-fluoro-nucleotide
  modified_base (7)..(7): 2'-OMe-nucleotide
  modified_base (8)..(8): 2'-fluoro-nucleotide
  modified_base (9)..(9): 2'-OMe-nucleotide
  modified_base (10)..(10): 2'-fluoro-nucleotide
  modified_base (11)..(11): 2'-OMe-nucleotide
  modified_base (12)..(12): 2'-fluoro-nucleotide
  modified_base (13)..(13): 2'-OMe-nucleotide
  modified_base (14)..(14): 2'-fluoro-nucleotide
  modified_base (15)..(15): 2'-OMe-nucleotide
  modified_base (16)..(16): 2'-fluoro-nucleotide
  modified_base (17)..(17): 2'-OMe-nucleotide
  modified_base (18)..(18): 2'-fluoro-nucleotide
  modified_base (19)..(19): 2'-OMe-nucleotide
  modified_base (20)..(20): 2'-fluoro-nucleotide
  modified_base (21)..(21): 2'-OMe-nucleotide
  modified_base (22)..(22): 2'-fluoro-nucleotide
  modified_base (23)..(23): Inverted nucleotide
ccauaccccgguuccaagccuat

SEQ ID NO: 641 - DNA, 23 bp, Artificial Sequence
  source: /note="Description of Artificial Sequence: Synthetic oligonucleotide"
  source: /note="Description of Combined DNA/RNA Molecule: Synthetic oligonucleotide"
  modified_base (1)..(1): 2'-OMe-nucleotide
  modified_base (2)..(2): 2'-OMe-nucleotide
  modified_base (3)..(3): 2'-OMe-nucleotide
  modified_base (4)..(4): 2'-fluoro-nucleotide
  modified_base (5)..(5): 2'-OMe-nucleotide
  modified_base (6)..(6): 2'-fluoro-nucleotide
  modified_base (7)..(7): 2'-OMe-nucleotide
  modified_base (8)..(8): 2'-fluoro-nucleotide
  modified_base (9)..(9): 2'-OMe-nucleotide
  modified_base (10)..(10): 2'-fluoro-nucleotide
  modified_base (11)..(11): 2'-OMe-nucleotide
  modified_base (12)..(12): 2'-fluoro-nucleotide
  modified_base (13)..(13): 2'-OMe-nucleotide
  modified_base (14)..(14): 2'-fluoro-nucleotide
  modified_base (15)..(15): 2'-OMe-nucleotide
  modified_base (16)..(16): 2'-fluoro-nucleotide
  modified_base (17)..(17): 2'-OMe-nucleotide
  modified_base (18)..(18): 2'-fluoro-nucleotide
  modified_base (19)..(19): 2'-OMe-nucleotide
  modified_base (20)..(20): 2'-fluoro-nucleotide
  modified_base (21)..(21): 2'-OMe-nucleotide
  modified_base (22)..(22): 2'-fluoro-nucleotide
  modified_base (23)..(23): Inverted nucleotide
ccagguuccaagccuagaggcut

SEQ ID NO: 642 - DNA, 23 bp, Artificial Sequence
  source: /note="Description of Artificial Sequence: Synthetic oligonucleotide"
  source: /note="Description of Combined DNA/RNA Molecule: Synthetic oligonucleotide"
  modified_base (1)..(1): 2'-OMe-nucleotide
  modified_base (2)..(2): 2'-OMe-nucleotide
  modified_base (3)..(3): 2'-OMe-nucleotide
  modified_base (4)..(4): 2'-fluoro-nucleotide
  modified_base (5)..(5): 2'-OMe-nucleotide
  modified_base (6)..(6): 2'-fluoro-nucleotide
  modified_base (7)..(7): 2'-OMe-nucleotide
  modified_base (8)..(8): 2'-fluoro-nucleotide
  modified_base (9)..(9): 2'-OMe-nucleotide
  modified_base (10)..(10): 2'-fluoro-nucleotide
  modified_base (11)..(11): 2'-OMe-nucleotide
  modified_base (12)..(12): 2'-fluoro-nucleotide
  modified_base (13)..(13): 2'-OMe-nucleotide
  modified_base (14)..(14): 2'-fluoro-nucleotide
  modified_base (15)..(15): 2'-OMe-nucleotide
  modified_base (16)..(16): 2'-fluoro-nucleotide
  modified_base (17)..(17): 2'-OMe-nucleotide
  modified_base (18)..(18): 2'-fluoro-nucleotide
  modified_base (19)..(19): 2'-OMe-nucleotide
  modified_base (20)..(20): 2'-fluoro-nucleotide
  modified_base (21)..(21): 2'-OMe-nucleotide
  modified_base (22)..(22): 2'-fluoro-nucleotide
  modified_base (23)..(23): Inverted nucleotide
ccaguuccaagccuagaggcuct

SEQ ID NO: 643 - DNA, 23 bp, Artificial Sequence
  source: /note="Description of Artificial Sequence: Synthetic oligonucleotide"
  source: /note="Description of Combined DNA/RNA Molecule: Synthetic oligonucleotide"
  modified_base (1)..(1): 2'-OMe-nucleotide
  modified_base (2)..(2): 2'-OMe-nucleotide
  modified_base (3)..(3): 2'-OMe-nucleotide
  modified_base (4)..(4): 2'-fluoro-nucleotide
  modified_base (5)..(5): 2'-OMe-nucleotide
  modified_base (6)..(6): 2'-fluoro-nucleotide
  modified_base (7)..(7): 2'-OMe-nucleotide
  modified_base (8)..(8): 2'-fluoro-nucleotide
  modified_base (9)..(9): 2'-OMe-nucleotide
  modified_base (10)..(10): 2'-fluoro-nucleotide
  modified_base (11)..(11): 2'-OMe-nucleotide
  modified_base (12)..(12): 2'-fluoro-nucleotide
  modified_base (13)..(13): 2'-OMe-nucleotide
  modified_base (14)..(14): 2'-fluoro-nucleotide
  modified_base (15)..(15): 2'-OMe-nucleotide
  modified_base (16)..(16): 2'-fluoro-nucleotide
  modified_base (17)..(17): 2'-OMe-nucleotide
  modified_base (18)..(18): 2'-fluoro-nucleotide
  modified_base (19)..(19): 2'-OMe-nucleotide
  modified_base (20)..(20): 2'-fluoro-nucleotide
  modified_base (21)..(21): 2'-OMe-nucleotide
  modified_base (22)..(22): 2'-fluoro-nucleotide
  modified_base (23)..(23): Inverted nucleotide
ccaccuagaggcuccuuccgaat

SEQ ID NO: 644 - DNA, 23 bp, Artificial Sequence
  source: /note="Description of Artificial Sequence: Synthetic oligonucleotide"
  source: /note="Description of Combined DNA/RNA Molecule: Synthetic oligonucleotide"
  modified_base (1)..(1): 2'-OMe-nucleotide
  modified_base (2)..(2): 2'-OMe-nucleotide
  modified_base (3)..(3): 2'-OMe-nucleotide
  modified_base (4)..(4): 2'-fluoro-nucleotide
  modified_base (5)..(5): 2'-OMe-nucleotide
  modified_base (6)..(6): 2'-fluoro-nucleotide
  modified_base (7)..(7): 2'-OMe-nucleotide
  modified_base (8)..(8): 2'-fluoro-nucleotide
  modified_base (9)..(9): 2'-OMe-nucleotide
  modified_base (10)..(10): 2'-fluoro-nucleotide
  modified_base (11)..(11): 2'-OMe-nucleotide
  modified_base (12)..(12): 2'-fluoro-nucleotide
  modified_base (13)..(13): 2'-OMe-nucleotide
  modified_base (14)..(14): 2'-fluoro-nucleotide
  modified_base (15)..(15): 2'-OMe-nucleotide
  modified_base (16)..(16): 2'-fluoro-nucleotide
  modified_base (17)..(17): 2'-OMe-nucleotide
  modified_base (18)..(18): 2'-fluoro-nucleotide
  modified_base (19)..(19): 2'-OMe-nucleotide
  modified_base (20)..(20): 2'-fluoro-nucleotide
  modified_base (21)..(21): 2'-OMe-nucleotide
  modified_base (22)..(22): 2'-fluoro-nucleotide
  modified_base (23)..(23): Inverted nucleotide
ccacuagaggcuccuuccgaact

SEQ ID NO: 645 - DNA, 23 bp, Artificial Sequence
  source: /note="Description of Artificial Sequence: Synthetic oligonucleotide"
  source: /note="Description of Combined DNA/RNA Molecule: Synthetic oligonucleotide"
  modified_base (1)..(1): 2'-OMe-nucleotide
  modified_base (2)..(2): 2'-OMe-nucleotide
  modified_base (3)..(3): 2'-OMe-nucleotide
  modified_base (4)..(4): 2'-fluoro-nucleotide
  modified_base (5)..(5): 2'-OMe-nucleotide
  modified_base (6)..(6): 2'-fluoro-nucleotide
  modified_base (7)..(7): 2'-OMe-nucleotide
  modified_base (8)..(8): 2'-fluoro-nucleotide
  modified_base (9)..(9): 2'-OMe-nucleotide
  modified_base (10)..(10): 2'-fluoro-nucleotide
  modified_base (11)..(11): 2'-OMe-nucleotide
  modified_base (12)..(12): 2'-fluoro-nucleotide
  modified_base (13)..(13): 2'-OMe-nucleotide
  modified_base (14)..(14): 2'-fluoro-nucleotide
  modified_base (15)..(15): 2'-OMe-nucleotide
  modified_base (16)..(16): 2'-fluoro-nucleotide
  modified_base (17)..(17): 2'-OMe-nucleotide
  modified_base (18)..(18): 2'-fluoro-nucleotide
  modified_base (19)..(19): 2'-OMe-nucleotide
  modified_base (20)..(20): 2'-fluoro-nucleotide
  modified_base (21)..(21): 2'-OMe-nucleotide
  modified_base (22)..(22): 2'-fluoro-nucleotide
  modified_base (23)..(23): Inverted nucleotide
ccaggcuccuuccgaacaagcat

SEQ ID NO: 646 - DNA, 23 bp, Artificial Sequence
  source: /note="Description of Artificial Sequence: Synthetic oligonucleotide"
  source: /note="Description of Combined DNA/RNA Molecule: Synthetic oligonucleotide"
  modified_base (1)..(1): 2'-OMe-nucleotide
  modified_base (2)..(2): 2'-OMe-nucleotide
  modified_base (3)..(3): 2'-OMe-nucleotide
  modified_base (4)..(4): 2'-fluoro-nucleotide
  modified_base (5)..(5): 2'-OMe-nucleotide
  modified_base (6)..(6): 2'-fluoro-nucleotide
  modified_base (7)..(7): 2'-OMe-nucleotide
  modified_base (8)..(8): 2'-fluoro-nucleotide
  modified_base (9)..(9): 2'-OMe-nucleotide
  modified_base (10)..(10): 2'-fluoro-nucleotide
  modified_base (11)..(11): 2'-OMe-nucleotide
  modified_base (12)..(12): 2'-fluoro-nucleotide
  modified_base (13)..(13): 2'-OMe-nucleotide
  modified_base (14)..(14): 2'-fluoro-nucleotide
  modified_base (15)..(15): 2'-OMe-nucleotide
  modified_base (16)..(16): 2'-fluoro-nucleotide
  modified_base (17)..(17): 2'-OMe-nucleotide
  modified_base (18)..(18): 2'-fluoro-nucleotide
  modified_base (19)..(19): 2'-OMe-nucleotide
  modified_base (20)..(20): 2'-fluoro-nucleotide
  modified_base (21)..(21): 2'-OMe-nucleotide
  modified_base (22)..(22): 2'-fluoro-nucleotide
  modified_base (23)..(23): Inverted nucleotide
ccaccuuccgaacaagcaccgat

SEQ ID NO: 647 - DNA, 23 bp, Artificial Sequence
  source: /note="Description of Artificial Sequence: Synthetic oligonucleotide"
  source: /note="Description of Combined DNA/RNA Molecule: Synthetic oligonucleotide"
  modified_base (1)..(1): 2'-OMe-nucleotide
  modified_base (2)..(2): 2'-OMe-nucleotide
  modified_base (3)..(3): 2'-OMe-nucleotide
  modified_base (4)..(4): 2'-fluoro-nucleotide
  modified_base (5)..(5): 2'-OMe-nucleotide
  modified_base (6)..(6): 2'-fluoro-nucleotide
  modified_base (7)..(7): 2'-OMe-nucleotide
  modified_base (8)..(8): 2'-fluoro-nucleotide
  modified_base (9)..(9): 2'-OMe-nucleotide
  modified_base (10)..(10): 2'-fluoro-nucleotide
  modified_base (11)..(11): 2'-OMe-nucleotide
  modified_base (12)..(12): 2'-fluoro-nucleotide
  modified_base (13)..(13): 2'-OMe-nucleotide
  modified_base (14)..(14): 2'-fluoro-nucleotide
  modified_base (15)..(15): 2'-OMe-nucleotide
  modified_base (16)..(16): 2'-fluoro-nucleotide
  modified_base (17)..(17): 2'-OMe-nucleotide
  modified_base (18)..(18): 2'-fluoro-nucleotide
  modified_base (19)..(19): 2'-OMe-nucleotide
  modified_base (20)..(20): 2'-fluoro-nucleotide
  modified_base (21)..(21): 2'-OMe-nucleotide
  modified_base (22)..(22): 2'-fluoro-nucleotide
  modified_base (23)..(23): Inverted nucleotide
ccacuuccgaacaagcaccgact

SEQ ID NO: 648 - DNA, 23 bp, Artificial Sequence
  source: /note="Description of Artificial Sequence: Synthetic oligonucleotide"
  source: /note="Description of Combined DNA/RNA Molecule: Synthetic oligonucleotide"
  modified_base (1)..(1): 2'-OMe-nucleotide
  modified_base (2)..(2): 2'-OMe-nucleotide
  modified_base (3)..(3): 2'-OMe-nucleotide
  modified_base (4)..(4): 2'-fluoro-nucleotide
  modified_base (5)..(5): 2'-OMe-nucleotide
  modified_base (6)..(6): 2'-fluoro-nucleotide
  modified_base (7)..(7): 2'-OMe-nucleotide
  modified_base (8)..(8): 2'-fluoro-nucleotide
  modified_base (9)..(9): 2'-OMe-nucleotide
  modified_base (10)..(10): 2'-fluoro-nucleotide
  modified_base (11)..(11): 2'-OMe-nucleotide
  modified_base (12)..(12): 2'-fluoro-nucleotide
  modified_base (13)..(13): 2'-OMe-nucleotide
  modified_base (14)..(14): 2'-fluoro-nucleotide
  modified_base (15)..(15): 2'-OMe-nucleotide
  modified_base (16)..(16): 2'-fluoro-nucleotide
  modified_base (17)..(17): 2'-OMe-nucleotide
  modified_base (18)..(18): 2'-fluoro-nucleotide
  modified_base (19)..(19): 2'-OMe-nucleotide
  modified_base (20)..(20): 2'-fluoro-nucleotide
  modified_base (21)..(21): 2'-OMe-nucleotide
  modified_base (22)..(22): 2'-fluoro-nucleotide
  modified_base (23)..(23): Inverted nucleotide
ccauuccgaacaagcaccgacut

SEQ ID NO: 649 - DNA, 23 bp, Artificial Sequence
  source: /note="Description of Artificial Sequence: Synthetic oligonucleotide"
  source: /note="Description of Combined DNA/RNA Molecule: Synthetic oligonucleotide"
  modified_base (1)..(1): 2'-OMe-nucleotide
  modified_base (2)..(2): 2'-OMe-nucleotide
  modified_base (3)..(3): 2'-OMe-nucleotide
  modified_base (4)..(4): 2'-fluoro-nucleotide
  modified_base (5)..(5): 2'-OMe-nucleotide
  modified_base (6)..(6): 2'-fluoro-nucleotide
  modified_base (7)..(7): 2'-OMe-nucleotide
  modified_base (8)..(8): 2'-fluoro-nucleotide
  modified_base (9)..(9): 2'-OMe-nucleotide
  modified_base (10)..(10): 2'-fluoro-nucleotide
  modified_base (11)..(11): 2'-OMe-nucleotide
  modified_base (12)..(12): 2'-fluoro-nucleotide
  modified_base (13)..(13): 2'-OMe-nucleotide
  modified_base (14)..(14): 2'-fluoro-nucleotide
  modified_base (15)..(15): 2'-OMe-nucleotide
  modified_base (16)..(16): 2'-fluoro-nucleotide
  modified_base (17)..(17): 2'-OMe-nucleotide
  modified_base (18)..(18): 2'-fluoro-nucleotide
  modified_base (19)..(19): 2'-OMe-nucleotide
  modified_base (20)..(20): 2'-fluoro-nucleotide
  modified_base (21)..(21): 2'-OMe-nucleotide
  modified_base (22)..(22): 2'-fluoro-nucleotide
  modified_base (23)..(23): Inverted nucleotide
ccauccgaacaagcaccgacugt

SEQ ID NO: 650 - DNA, 23 bp, Artificial Sequence
  source: /note="Description of Artificial Sequence: Synthetic oligonucleotide"
  source: /note="Description of Combined DNA/RNA Molecule: Synthetic oligonucleotide"
  modified_base (1)..(1): 2'-OMe-nucleotide
  modified_base (2)..(2): 2'-OMe-nucleotide
  modified_base (3)..(3): 2'-OMe-nucleotide
  modified_base (4)..(4): 2'-fluoro-nucleotide
  modified_base (5)..(5): 2'-OMe-nucleotide
  modified_base (6)..(6): 2'-fluoro-nucleotide
  modified_base (7)..(7): 2'-OMe-nucleotide
  modified_base (8)..(8): 2'-fluoro-nucleotide
  modified_base (9)..(9): 2'-OMe-nucleotide
  modified_base (10)..(10): 2'-fluoro-nucleotide
  modified_base (11)..(11): 2'-OMe-nucleotide
  modified_base (12)..(12): 2'-fluoro-nucleotide
  modified_base (13)..(13): 2'-OMe-nucleotide
  modified_base (14)..(14): 2'-fluoro-nucleotide
  modified_base (15)..(15): 2'-OMe-nucleotide
  modified_base (16)..(16): 2'-fluoro-nucleotide
  modified_base (17)..(17): 2'-OMe-nucleotide
  modified_base (18)..(18): 2'-fluoro-nucleotide
  modified_base (19)..(19): 2'-OMe-nucleotide
  modified_base (20)..(20): 2'-fluoro-nucleotide
  modified_base (21)..(21): 2'-OMe-nucleotide
  modified_base (22)..(22): 2'-fluoro-nucleotide
  modified_base (23)..(23): Inverted nucleotide
ccaccgaacaagcaccgacugat

SEQ ID NO: 651 - DNA, 23 bp, Artificial Sequence
  source: /note="Description of Artificial Sequence: Synthetic oligonucleotide"
  source: /note="Description of Combined DNA/RNA Molecule: Synthetic oligonucleotide"
  modified_base (1)..(1): 2'-OMe-nucleotide
  modified_base (2)..(2): 2'-OMe-nucleotide
  modified_base (3)..(3): 2'-OMe-nucleotide
  modified_base (4)..(4): 2'-fluoro-nucleotide
  modified_base (5)..(5): 2'-OMe-nucleotide
  modified_base (6)..(6): 2'-fluoro-nucleotide
  modified_base (7)..(7): 2'-OMe-nucleotide
  modified_base (8)..(8): 2'-fluoro-nucleotide
  modified_base (9)..(9): 2'-OMe-nucleotide
  modified_base (10)..(10): 2'-fluoro-nucleotide
  modified_base (11)..(11): 2'-OMe-nucleotide
  modified_base (12)..(12): 2'-fluoro-nucleotide
  modified_base (13)..(13): 2'-OMe-nucleotide
  modified_base (14)..(14): 2'-fluoro-nucleotide
  modified_base (15)..(15): 2'-OMe-nucleotide
  modified_base (16)..(16): 2'-fluoro-nucleotide
  modified_base (17)..(17): 2'-OMe-nucleotide
  modified_base (18)..(18): 2'-fluoro-nucleotide
  modified_base (19)..(19): 2'-OMe-nucleotide
  modified_base (20)..(20): 2'-fluoro-nucleotide
  modified_base (21)..(21): 2'-OMe-nucleotide
  modified_base (22)..(22): 2'-fluoro-nucleotide
  modified_base (23)..(23): Inverted nucleotide
ccagaacaagcaccgacugagct

SEQ ID NO: 652 - DNA, 23 bp, Artificial Sequence
  source: /note="Description of Artificial Sequence: Synthetic oligonucleotide"
  source: /note="Description of Combined DNA/RNA Molecule: Synthetic oligonucleotide"
  modified_base (1)..(1): 2'-OMe-nucleotide
  modified_base (2)..(2): 2'-OMe-nucleotide
  modified_base (3)..(3): 2'-OMe-nucleotide
  modified_base (4)..(4): 2'-fluoro-nucleotide
  modified_base (5)..(5): 2'-OMe-nucleotide
  modified_base (6)..(6): 2'-fluoro-nucleotide
  modified_base (7)..(7): 2'-OMe-nucleotide
  modified_base (8)..(8): 2'-fluoro-nucleotide
  modified_base (9)..(9): 2'-OMe-nucleotide
  modified_base (10)..(10): 2'-fluoro-nucleotide
  modified_base (11)..(11): 2'-OMe-nucleotide
  modified_base (12)..(12): 2'-fluoro-nucleotide
  modified_base (13)..(13): 2'-OMe-nucleotide
  modified_base (14)..(14): 2'-fluoro-nucleotide
  modified_base (15)..(15): 2'-OMe-nucleotide
  modified_base (16)..(16): 2'-fluoro-nucleotide
  modified_base (17)..(17): 2'-OMe-nucleotide
  modified_base (18)..(18): 2'-fluoro-nucleotide
  modified_base (19)..(19): 2'-OMe-nucleotide
  modified_base (20)..(20): 2'-fluoro-nucleotide
  modified_base (21)..(21): 2'-OMe-nucleotide
  modified_base (22)..(22): 2'-fluoro-nucleotide
  modified_base (23)..(23): Inverted nucleotide
ccaaacaagcaccgacugagcat

SEQ ID NO: 653 - DNA, 23 bp, Artificial Sequence
  source: /note="Description of Artificial Sequence: Synthetic oligonucleotide"
  source: /note="Description of Combined DNA/RNA Molecule: Synthetic oligonucleotide"
  modified_base (1)..(1): 2'-OMe-nucleotide
  modified_base (2)..(2): 2'-OMe-nucleotide
  modified_base (3)..(3): 2'-OMe-nucleotide
  modified_base (4)..(4): 2'-fluoro-nucleotide
  modified_base (5)..(5): 2'-OMe-nucleotide
  modified_base (6)..(6): 2'-fluoro-nucleotide
  modified_base (7)..(7): 2'-OMe-nucleotide
  modified_base (8)..(8): 2'-fluoro-nucleotide
  modified_base (9)..(9): 2'-OMe-nucleotide
  modified_base (10)..(10): 2'-fluoro-nucleotide
  modified_base (11)..(11): 2'-OMe-nucleotide
  modified_base (12)..(12): 2'-fluoro-nucleotide
  modified_base (13)..(13): 2'-OMe-nucleotide
  modified_base (14)..(14): 2'-fluoro-nucleotide
  modified_base (15)..(15): 2'-OMe-nucleotide
  modified_base (16)..(16): 2'-fluoro-nucleotide
  modified_base (17)..(17): 2'-OMe-nucleotide
  modified_base (18)..(18): 2'-fluoro-nucleotide
  modified_base (19)..(19): 2'-OMe-nucleotide
  modified_base (20)..(20): 2'-fluoro-nucleotide
  modified_base (21)..(21): 2'-OMe-nucleotide
  modified_base (22)..(22): 2'-fluoro-nucleotide
  modified_base (23)..(23): Inverted nucleotide
ccaacaagcaccgacugagcaat

SEQ ID NO: 654 - DNA, 23 bp, Artificial Sequence
  source: /note="Description of Artificial Sequence: Synthetic oligonucleotide"
  source: /note="Description of Combined DNA/RNA Molecule: Synthetic oligonucleotide"
  modified_base (1)..(1): 2'-OMe-nucleotide
  modified_base (2)..(2): 2'-OMe-nucleotide
  modified_base (3)..(3): 2'-OMe-nucleotide
  modified_base (4)..(4): 2'-fluoro-nucleotide
  modified_base (5)..(5): 2'-OMe-nucleotide
  modified_base (6)..(6): 2'-fluoro-nucleotide
  modified_base (7)..(7): 2'-OMe-nucleotide
  modified_base (8)..(8): 2'-fluoro-nucleotide
  modified_base (9)..(9): 2'-OMe-nucleotide
  modified_base (10)..(10): 2'-fluoro-nucleotide
  modified_base (11)..(11): 2'-OMe-nucleotide
  modified_base (12)..(12): 2'-fluoro-nucleotide
  modified_base (13)..(13): 2'-OMe-nucleotide
  modified_base (14)..(14): 2'-fluoro-nucleotide
  modified_base (15)..(15): 2'-OMe-nucleotide
  modified_base (16)..(16): 2'-fluoro-nucleotide
  modified_base (17)..(17): 2'-OMe-nucleotide
  modified_base (18)..(18): 2'-fluoro-nucleotide
  modified_base (19)..(19): 2'-OMe-nucleotide
  modified_base (20)..(20): 2'-fluoro-nucleotide
  modified_base (21)..(21): 2'-OMe-nucleotide
  modified_base (22)..(22): 2'-fluoro-nucleotide
  modified_base (23)..(23): Inverted nucleotide
ccacaagcaccgacugagcaaat

SEQ ID NO: 655 - DNA, 23 bp, Artificial Sequence
  source: /note="Description of Artificial Sequence: Synthetic oligonucleotide"
  source: /note="Description of Combined DNA/RNA Molecule: Synthetic oligonucleotide"
  modified_base (1)..(1): 2'-OMe-nucleotide
  modified_base (2)..(2): 2'-OMe-nucleotide
  modified_base (3)..(3): 2'-OMe-nucleotide
  modified_base (4)..(4): 2'-fluoro-nucleotide
  modified_base (5)..(5): 2'-OMe-nucleotide
  modified_base (6)..(6): 2'-fluoro-nucleotide
  modified_base (7)..(7): 2'-OMe-nucleotide
  modified_base (8)..(8): 2'-fluoro-nucleotide
  modified_base (9)..(9): 2'-OMe-nucleotide
  modified_base (10)..(10): 2'-fluoro-nucleotide
  modified_base (11)..(11): 2'-OMe-nucleotide
  modified_base (12)..(12): 2'-fluoro-nucleotide
  modified_base (13)..(13): 2'-OMe-nucleotide
  modified_base (14)..(14): 2'-fluoro-nucleotide
  modified_base (15)..(15): 2'-OMe-nucleotide
  modified_base (16)..(16): 2'-fluoro-nucleotide
  modified_base (17)..(17): 2'-OMe-nucleotide
  modified_base (18)..(18): 2'-fluoro-nucleotide
  modified_base (19)..(19): 2'-OMe-nucleotide
  modified_base (20)..(20): 2'-fluoro-nucleotide
  modified_base (21)..(21): 2'-OMe-nucleotide
  modified_base (22)..(22): 2'-fluoro-nucleotide
  modified_base (23)..(23): Inverted nucleotide
ccaaagcaccgacugagcaaagt

SEQ ID NO: 656 - DNA, 23 bp, Artificial Sequence
  source: /note="Description of Artificial Sequence: Synthetic oligonucleotide"
  source: /note="Description of Combined DNA/RNA Molecule: Synthetic oligonucleotide"
  modified_base (1)..(1): 2'-OMe-nucleotide
  modified_base (2)..(2): 2'-OMe-nucleotide
  modified_base (3)..(3): 2'-OMe-nucleotide
  modified_base (4)..(4): 2'-fluoro-nucleotide
  modified_base (5)..(5): 2'-OMe-nucleotide
  modified_base (6)..(6): 2'-fluoro-nucleotide
  modified_base (7)..(7): 2'-OMe-nucleotide
  modified_base (8)..(8): 2'-fluoro-nucleotide
  modified_base (9)..(9): 2'-OMe-nucleotide
  modified_base (10)..(10): 2'-fluoro-nucleotide
  modified_base (11)..(11): 2'-OMe-nucleotide
  modified_base (12)..(12): 2'-fluoro-nucleotide
  modified_base (13)..(13): 2'-OMe-nucleotide
  modified_base (14)..(14): 2'-fluoro-nucleotide
  modified_base (15)..(15): 2'-OMe-nucleotide
  modified_base (16)..(16): 2'-fluoro-nucleotide
  modified_base (17)..(17): 2'-OMe-nucleotide
  modified_base (18)..(18): 2'-fluoro-nucleotide
  modified_base (19)..(19): 2'-OMe-nucleotide
  modified_base (20)..(20): 2'-fluoro-nucleotide
  modified_base (21)..(21): 2'-OMe-nucleotide
  modified_base (22)..(22): 2'-fluoro-nucleotide
  modified_base (23)..(23): Inverted nucleotide
ccaagcaccgacugagcaaaggt

SEQ ID NO: 657 - DNA, 23 bp, Artificial Sequence
  source: /note="Description of Artificial Sequence: Synthetic oligonucleotide"
  source: /note="Description of Combined DNA/RNA Molecule: Synthetic oligonucleotide"
  modified_base (1)..(1): 2'-OMe-nucleotide
  modified_base (2)..(2): 2'-OMe-nucleotide
  modified_base (3)..(3): 2'-OMe-nucleotide
  modified_base (4)..(4): 2'-fluoro-nucleotide
  modified_base (5)..(5): 2'-OMe-nucleotide
  modified_base (6)..(6): 2'-fluoro-nucleotide
  modified_base (7)..(7): 2'-OMe-nucleotide
  modified_base (8)..(8): 2'-fluoro-nucleotide
  modified_base (9)..(9): 2'-OMe-nucleotide
  modified_base (10)..(10): 2'-fluoro-nucleotide
  modified_base (11)..(11): 2'-OMe-nucleotide
  modified_base (12)..(12): 2'-fluoro-nucleotide
  modified_base (13)..(13): 2'-OMe-nucleotide
  modified_base (14)..(14): 2'-fluoro-nucleotide
  modified_base (15)..(15): 2'-OMe-nucleotide
  modified_base (16)..(16): 2'-fluoro-nucleotide
  modified_base (17)..(17): 2'-OMe-nucleotide
  modified_base (18)..(18): 2'-fluoro-nucleotide
  modified_base (19)..(19): 2'-OMe-nucleotide
  modified_base (20)..(20): 2'-fluoro-nucleotide
  modified_base (21)..(21): 2'-OMe-nucleotide
  modified_base (22)..(22): 2'-fluoro-nucleotide
  modified_base (23)..(23): Inverted nucleotide
ccaugguaauggacagaguuaut

SEQ ID NO: 658 - DNA, 23 bp, Artificial Sequence
  source: /note="Description of Artificial Sequence: Synthetic oligonucleotide"
  source: /note="Description of Combined DNA/RNA Molecule: Synthetic oligonucleotide"
  modified_base (1)..(1): 2'-OMe-nucleotide
  modified_base (2)..(2): 2'-OMe-nucleotide
  modified_base (3)..(3): 2'-OMe-nucleotide
  modified_base (4)..(4): 2'-fluoro-nucleotide
  modified_base (5)..(5): 2'-OMe-nucleotide
  modified_base (6)..(6): 2'-fluoro-nucleotide
  modified_base (7)..(7): 2'-OMe-nucleotide
  modified_base (8)..(8): 2'-fluoro-nucleotide
  modified_base (9)..(9): 2'-OMe-nucleotide
  modified_base (10)..(10): 2'-fluoro-nucleotide
  modified_base (11)..(11): 2'-OMe-nucleotide
  modified_base (12)..(12): 2'-fluoro-nucleotide
  modified_base (13)..(13): 2'-OMe-nucleotide
  modified_base (14)..(14): 2'-fluoro-nucleotide
  modified_base (15)..(15): 2'-OMe-nucleotide
  modified_base (16)..(16): 2'-fluoro-nucleotide
  modified_base (17)..(17): 2'-OMe-nucleotide
  modified_base (18)..(18): 2'-fluoro-nucleotide
  modified_base (19)..(19): 2'-OMe-nucleotide
  modified_base (20)..(20): 2'-fluoro-nucleotide
  modified_base (21)..(21): 2'-OMe-nucleotide
  modified_base (22)..(22): 2'-fluoro-nucleotide
  modified_base (23)..(23): Inverted nucleotide
ccaguaauggacagaguuaucgt

SEQ ID NO: 659 - DNA, 23 bp, Artificial Sequence
  source: /note="Description of Artificial Sequence: Synthetic oligonucleotide"
  source: /note="Description of Combined DNA/RNA Molecule: Synthetic oligonucleotide"
  modified_base (1)..(1): 2'-OMe-nucleotide
  modified_base (2)..(2): 2'-OMe-nucleotide
  modified_base (3)..(3): 2'-OMe-nucleotide
  modified_base (4)..(4): 2'-fluoro-nucleotide
  modified_base (5)..(5): 2'-OMe-nucleotide
  modified_base (6)..(6): 2'-fluoro-nucleotide
  modified_base (7)..(7): 2'-OMe-nucleotide
  modified_base (8)..(8): 2'-fluoro-nucleotide
  modified_base (9)..(9): 2'-OMe-nucleotide
  modified_base (10)..(10): 2'-fluoro-nucleotide
  modified_base (11)..(11): 2'-OMe-nucleotide
  modified_base (12)..(12): 2'-fluoro-nucleotide
  modified_base (13)..(13): 2'-OMe-nucleotide
  modified_base (14)..(14): 2'-fluoro-nucleotide
  modified_base (15)..(15): 2'-OMe-nucleotide
  modified_base (16)..(16): 2'-fluoro-nucleotide
  modified_base (17)..(17): 2'-OMe-nucleotide
  modified_base (18)..(18): 2'-fluoro-nucleotide
  modified_base (19)..(19): 2'-OMe-nucleotide
  modified_base (20)..(20): 2'-fluoro-nucleotide
  modified_base (21)..(21): 2'-OMe-nucleotide
  modified_base (22)..(22): 2'-fluoro-nucleotide
  modified_base (23)..(23): Inverted nucleotide
ccauaauggacagaguuaucgat

SEQ ID NO: 660 - DNA, 23 bp, Artificial Sequence
  source: /note="Description of Artificial Sequence: Synthetic oligonucleotide"
  source: /note="Description of Combined DNA/RNA Molecule: Synthetic oligonucleotide"
  modified_base (1)..(1): 2'-OMe-nucleotide
  modified_base (2)..(2): 2'-OMe-nucleotide
  modified_base (3)..(3): 2'-OMe-nucleotide
  modified_base (4)..(4): 2'-fluoro-nucleotide
  modified_base (5)..(5): 2'-OMe-nucleotide
  modified_base (6)..(6): 2'-fluoro-nucleotide
  modified_base (7)..(7): 2'-OMe-nucleotide
  modified_base (8)..(8): 2'-fluoro-nucleotide
  modified_base (9)..(9): 2'-OMe-nucleotide
  modified_base (10)..(10): 2'-fluoro-nucleotide
  modified_base (11)..(11): 2'-OMe-nucleotide
  modified_base (12)..(12): 2'-fluoro-nucleotide
  modified_base (13)..(13): 2'-OMe-nucleotide
  modified_base (14)..(14): 2'-fluoro-nucleotide
  modified_base (15)..(15): 2'-OMe-nucleotide
  modified_base (16)..(16): 2'-fluoro-nucleotide
  modified_base (17)..(17): 2'-OMe-nucleotide
  modified_base (18)..(18): 2'-fluoro-nucleotide
  modified_base (19)..(19): 2'-OMe-nucleotide
  modified_base (20)..(20): 2'-fluoro-nucleotide
  modified_base (21)..(21): 2'-OMe-nucleotide
  modified_base (22)..(22): 2'-fluoro-nucleotide
  modified_base (23)..(23): Inverted nucleotide
ccaagaguuaucgaggcacauat

SEQ ID NO: 661 - DNA, 23 bp, Artificial Sequence
  source: /note="Description of Artificial Sequence: Synthetic oligonucleotide"
  source: /note="Description of Combined DNA/RNA Molecule: Synthetic oligonucleotide"
  modified_base (1)..(1): 2'-OMe-nucleotide
  modified_base (2)..(2): 2'-OMe-nucleotide
  modified_base (3)..(3): 2'-OMe-nucleotide
  modified_base (4)..(4): 2'-fluoro-nucleotide
  modified_base (5)..(5): 2'-OMe-nucleotide
  modified_base (6)..(6): 2'-fluoro-nucleotide
  modified_base (7)..(7): 2'-OMe-nucleotide
  modified_base (8)..(8): 2'-fluoro-nucleotide
  modified_base (9)..(9): 2'-OMe-nucleotide
  modified_base (10)..(10): 2'-fluoro-nucleotide
  modified_base (11)..(11): 2'-OMe-nucleotide
  modified_base (12)..(12): 2'-fluoro-nucleotide
  modified_base (13)..(13): 2'-OMe-nucleotide
  modified_base (14)..(14): 2'-fluoro-nucleotide
  modified_base (15)..(15): 2'-OMe-nucleotide
  modified_base (16)..(16): 2'-fluoro-nucleotide
  modified_base (17)..(17): 2'-OMe-nucleotide
  modified_base (18)..(18): 2'-fluoro-nucleotide
  modified_base (19)..(19): 2'-OMe-nucleotide
  modified_base (20)..(20): 2'-fluoro-nucleotide
  modified_base (21)..(21): 2'-OMe-nucleotide
  modified_base (22)..(22): 2'-fluoro-nucleotide
  modified_base (23)..(23): Inverted nucleotide
ccagaguuaucgaggcacauact

SEQ ID NO: 662 - DNA, 23 bp, Artificial Sequence
  source: /note="Description of Artificial Sequence: Synthetic oligonucleotide"
  source: /note="Description of Combined DNA/RNA Molecule: Synthetic oligonucleotide"
  modified_base (1)..(1): 2'-OMe-nucleotide
  modified_base (2)..(2): 2'-OMe-nucleotide
  modified_base (3)..(3): 2'-OMe-nucleotide
  modified_base (4)..(4): 2'-fluoro-nucleotide
  modified_base (5)..(5): 2'-OMe-nucleotide
  modified_base (6)..(6): 2'-fluoro-nucleotide
  modified_base (7)..(7): 2'-OMe-nucleotide
  modified_base (8)..(8): 2'-fluoro-nucleotide
  modified_base (9)..(9): 2'-OMe-nucleotide
  modified_base (10)..(10): 2'-fluoro-nucleotide
  modified_base (11)..(11): 2'-OMe-nucleotide
  modified_base (12)..(12): 2'-fluoro-nucleotide
  modified_base (13)..(13): 2'-OMe-nucleotide
  modified_base (14)..(14): 2'-fluoro-nucleotide
  modified_base (15)..(15): 2'-OMe-nucleotide
  modified_base (16)..(16): 2'-fluoro-nucleotide
  modified_base (17)..(17): 2'-OMe-nucleotide
  modified_base (18)..(18): 2'-fluoro-nucleotide
  modified_base (19)..(19): 2'-OMe-nucleotide
  modified_base (20)..(20): 2'-fluoro-nucleotide
  modified_base (21)..(21): 2'-OMe-nucleotide
  modified_base (22)..(22): 2'-fluoro-nucleotide
  modified_base (23)..(23): Inverted nucleotide
ccaaguuaucgaggcacauacut

SEQ ID NO: 663 - DNA, 23 bp, Artificial Sequence
  source: /note="Description of Artificial Sequence: Synthetic oligonucleotide"
  source: /note="Description of Combined DNA/RNA Molecule: Synthetic oligonucleotide"
  modified_base (1)..(1): 2'-OMe-nucleotide
  modified_base (2)..(2): 2'-OMe-nucleotide
  modified_base (3)..(3): 2'-OMe-nucleotide
  modified_base (4)..(4): 2'-fluoro-nucleotide
  modified_base (5)..(5): 2'-OMe-nucleotide
  modified_base (6)..(6): 2'-fluoro-nucleotide
  modified_base (7)..(7): 2'-OMe-nucleotide
  modified_base (8)..(8): 2'-fluoro-nucleotide
  modified_base (9)..(9): 2'-OMe-nucleotide
  modified_base (10)..(10): 2'-fluoro-nucleotide
  modified_base (11)..(11): 2'-OMe-nucleotide
  modified_base (12)..(12): 2'-fluoro-nucleotide
  modified_base (13)..(13): 2'-OMe-nucleotide
  modified_base (14)..(14): 2'-fluoro-nucleotide
  modified_base (15)..(15): 2'-OMe-nucleotide
  modified_base (16)..(16): 2'-fluoro-nucleotide
  modified_base (17)..(17): 2'-OMe-nucleotide
  modified_base (18)..(18): 2'-fluoro-nucleotide
  modified_base (19)..(19): 2'-OMe-nucleotide
  modified_base (20)..(20): 2'-fluoro-nucleotide
  modified_base (21)..(21): 2'-OMe-nucleotide
  modified_base (22)..(22): 2'-fluoro-nucleotide
  modified_base (23)..(23): Inverted nucleotide
ccaguuaucgaggcacauacuct

SEQ ID NO: 664 - DNA, 23 bp, Artificial Sequence
  source: /note="Description of Artificial Sequence: Synthetic oligonucleotide"
  source: /note="Description of Combined DNA/RNA Molecule: Synthetic oligonucleotide"
  modified_base (1)..(1): 2'-OMe-nucleotide
  modified_base (2)..(2): 2'-OMe-nucleotide
  modified_base (3)..(3): 2'-OMe-nucleotide
  modified_base (4)..(4): 2'-fluoro-nucleotide
  modified_base (5)..(5): 2'-OMe-nucleotide
  modified_base (6)..(6): 2'-fluoro-nucleotide
  modified_base (7)..(7): 2'-OMe-nucleotide
  modified_base (8)..(8): 2'-fluoro-nucleotide
  modified_base (9)..(9): 2'-OMe-nucleotide
  modified_base (10)..(10): 2'-fluoro-nucleotide
  modified_base (11)..(11): 2'-OMe-nucleotide
  modified_base (12)..(12): 2'-fluoro-nucleotide
  modified_base (13)..(13): 2'-OMe-nucleotide
  modified_base (14)..(14): 2'-fluoro-nucleotide
  modified_base (15)..(15): 2'-OMe-nucleotide
  modified_base (16)..(16): 2'-fluoro-nucleotide
  modified_base (17)..(17): 2'-OMe-nucleotide
  modified_base (18)..(18): 2'-fluoro-nucleotide
  modified_base (19)..(19): 2'-OMe-nucleotide
  modified_base (20)..(20): 2'-fluoro-nucleotide
  modified_base (21)..(21): 2'-OMe-nucleotide
  modified_base (22)..(22): 2'-fluoro-nucleotide
  modified_base (23)..(23): Inverted nucleotide
ccauuaucgaggcacauacucct

SEQ ID NO: 665 - DNA, 23 bp, Artificial Sequence
  source: /note="Description of Artificial Sequence: Synthetic oligonucleotide"
  source: /note="Description of Combined DNA/RNA Molecule: Synthetic oligonucleotide"
  modified_base (1)..(1): 2'-OMe-nucleotide
  modified_base (2)..(2): 2'-OMe-nucleotide
  modified_base (3)..(3): 2'-OMe-nucleotide
  modified_base (4)..(4): 2'-fluoro-nucleotide
  modified_base (5)..(5): 2'-OMe-nucleotide
  modified_base (6)..(6): 2'-fluoro-nucleotide
  modified_base (7)..(7): 2'-OMe-nucleotide
  modified_base (8)..(8): 2'-fluoro-nucleotide
  modified_base (9)..(9): 2'-OMe-nucleotide
  modified_base (10)..(10): 2'-fluoro-nucleotide
  modified_base (11)..(11): 2'-OMe-nucleotide
  modified_base (12)..(12): 2'-fluoro-nucleotide
  modified_base (13)..(13): 2'-OMe-nucleotide
  modified_base (14)..(14): 2'-fluoro-nucleotide
  modified_base (15)..(15): 2'-OMe-nucleotide
  modified_base (16)..(16): 2'-fluoro-nucleotide
  modified_base (17)..(17): 2'-OMe-nucleotide
  modified_base (18)..(18): 2'-fluoro-nucleotide
  modified_base (19)..(19): 2'-OMe-nucleotide
  modified_base (20)..(20): 2'-fluoro-nucleotide
  modified_base (21)..(21): 2'-OMe-nucleotide
  modified_base (22)..(22): 2'-fluoro-nucleotide
  modified_base (23)..(23): Inverted nucleotide
ccaggcacauacuccaccacugt

SEQ ID NO: 666 - DNA, 23 bp, Artificial Sequence
  source: /note="Description of Artificial Sequence: Synthetic oligonucleotide"
  source: /note="Description of Combined DNA/RNA Molecule: Synthetic oligonucleotide"
  modified_base (1)..(1): 2'-OMe-nucleotide
  modified_base (2)..(2): 2'-OMe-nucleotide
  modified_base (3)..(3): 2'-OMe-nucleotide
  modified_base (4)..(4): 2'-fluoro-nucleotide
  modified_base (5)..(5): 2'-OMe-nucleotide
  modified_base (6)..(6): 2'-fluoro-nucleotide
  modified_base (7)..(7): 2'-OMe-nucleotide
  modified_base (8)..(8): 2'-fluoro-nucleotide
  modified_base (9)..(9): 2'-OMe-nucleotide
  modified_base (10)..(10): 2'-fluoro-nucleotide
  modified_base (11)..(11): 2'-OMe-nucleotide
  modified_base (12)..(12): 2'-fluoro-nucleotide
  modified_base (13)..(13): 2'-OMe-nucleotide
  modified_base (14)..(14): 2'-fluoro-nucleotide
  modified_base (15)..(15): 2'-OMe-nucleotide
  modified_base (16)..(16): 2'-fluoro-nucleotide
  modified_base (17)..(17): 2'-OMe-nucleotide
  modified_base (18)..(18): 2'-fluoro-nucleotide
  modified_base (19)..(19): 2'-OMe-nucleotide
  modified_base (20)..(20): 2'-fluoro-nucleotide
  modified_base (21)..(21): 2'-OMe-nucleotide
  modified_base (22)..(22): 2'-fluoro-nucleotide
  modified_base (23)..(23): Inverted nucleotide
ccacauacuccaccacugucact

SEQ ID NO: 667 - DNA, 23 bp, Artificial Sequence
  source: /note="Description of Artificial Sequence: Synthetic oligonucleotide"
  source: /note="Description of Combined DNA/RNA Molecule: Synthetic oligonucleotide"
  modified_base (1)..(1): 2'-OMe-nucleotide
  modified_base (2)..(2): 2'-OMe-nucleotide
  modified_base (3)..(3): 2'-OMe-nucleotide
  modified_base (4)..(4): 2'-fluoro-nucleotide
  modified_base (5)..(5): 2'-OMe-nucleotide
  modified_base (6)..(6): 2'-fluoro-nucleotide
  modified_base (7)..(7): 2'-OMe-nucleotide
  modified_base (8)..(8): 2'-fluoro-nucleotide
  modified_base (9)..(9): 2'-OMe-nucleotide
  modified_base (10)..(10): 2'-fluoro-nucleotide
  modified_base (11)..(11): 2'-OMe-nucleotide
  modified_base (12)..(12): 2'-fluoro-nucleotide
  modified_base (13)..(13): 2'-OMe-nucleotide
  modified_base (14)..(14): 2'-fluoro-nucleotide
  modified_base (15)..(15): 2'-OMe-nucleotide
  modified_base (16)..(16): 2'-fluoro-nucleotide
  modified_base (17)..(17): 2'-OMe-nucleotide
  modified_base (18)..(18): 2'-fluoro-nucleotide
  modified_base (19)..(19): 2'-OMe-nucleotide
  modified_base (20)..(20): 2'-fluoro-nucleotide
  modified_base (21)..(21): 2'-OMe-nucleotide
  modified_base (22)..(22): 2'-fluoro-nucleotide
  modified_base (23)..(23): Inverted nucleotide
ccaggaagaaccugccaagcuut

SEQ ID NO: 668 - DNA, 23 bp, Artificial Sequence
  source: /note="Description of Artificial Sequence: Synthetic oligonucleotide"
  source: /note="Description of Combined DNA/RNA Molecule: Synthetic oligonucleotide"
  modified_base (1)..(1): 2'-OMe-nucleotide
  modified_base (2)..(2): 2'-OMe-nucleotide
  modified_base (3)..(3): 2'-OMe-nucleotide
  modified_base (4)..(4): 2'-fluoro-nucleotide
  modified_base (5)..(5): 2'-OMe-nucleotide
  modified_base (6)..(6): 2'-fluoro-nucleotide
  modified_base (7)..(7): 2'-OMe-nucleotide
  modified_base (8)..(8): 2'-fluoro-nucleotide
  modified_base (9)..(9): 2'-OMe-nucleotide
  modified_base (10)..(10): 2'-fluoro-nucleotide
  modified_base (11)..(11): 2'-OMe-nucleotide
  modified_base (12)..(12): 2'-fluoro-nucleotide
  modified_base (13)..(13): 2'-OMe-nucleotide
  modified_base (14)..(14): 2'-fluoro-nucleotide
  modified_base (15)..(15): 2'-OMe-nucleotide
  modified_base (16)..(16): 2'-fluoro-nucleotide
  modified_base (17)..(17): 2'-OMe-nucleotide
  modified_base (18)..(18): 2'-fluoro-nucleotide
  modified_base (19)..(19): 2'-OMe-nucleotide
  modified_base (20)..(20): 2'-fluoro-nucleotide
  modified_base (21)..(21): 2'-OMe-nucleotide
  modified_base (22)..(22): 2'-fluoro-nucleotide
  modified_base (23)..(23): Inverted nucleotide
ccauaugacaccacacucgcaut

SEQ ID NO: 669 - DNA, 23 bp, Artificial Sequence
  source: /note="Description of Artificial Sequence: Synthetic oligonucleotide"
  source: /note="Description of Combined DNA/RNA Molecule: Synthetic oligonucleotide"
  modified_base (1)..(1): 2'-OMe-nucleotide
  modified_base (2)..(2): 2'-OMe-nucleotide
  modified_base (3)..(3): 2'-OMe-nucleotide
  modified_base (4)..(4): 2'-fluoro-nucleotide
  modified_base (5)..(5): 2'-OMe-nucleotide
  modified_base (6)..(6): 2'-fluoro-nucleotide
  modified_base (7)..(7): 2'-OMe-nucleotide
  modified_base (8)..(8): 2'-fluoro-nucleotide
  modified_base (9)..(9): 2'-OMe-nucleotide
  modified_base (10)..(10): 2'-fluoro-nucleotide
  modified_base (11)..(11): 2'-OMe-nucleotide
  modified_base (12)..(12): 2'-fluoro-nucleotide
  modified_base (13)..(13): 2'-OMe-nucleotide
  modified_base (14)..(14): 2'-fluoro-nucleotide
  modified_base (15)..(15): 2'-OMe-nucleotide
  modified_base (16)..(16): 2'-fluoro-nucleotide
  modified_base (17)..(17): 2'-OMe-nucleotide
  modified_base (18)..(18): 2'-fluoro-nucleotide
  modified_base (19)..(19): 2'-OMe-nucleotide
  modified_base (20)..(20): 2'-fluoro-nucleotide
  modified_base (21)..(21): 2'-OMe-nucleotide
  modified_base (22)..(22): 2'-fluoro-nucleotide
  modified_base (23)..(23): Inverted nucleotide
ccaaugacaccacacucgcauat

SEQ ID NO: 670 - DNA, 23 bp, Artificial Sequence
  source: /note="Description of Artificial Sequence: Synthetic oligonucleotide"
  source: /note="Description of Combined DNA/RNA Molecule: Synthetic oligonucleotide"
  modified_base (1)..(1): 2'-OMe-nucleotide
  modified_base (2)..(2): 2'-OMe-nucleotide
  modified_base (3)..(3): 2'-OMe-nucleotide
  modified_base (4)..(4): 2'-fluoro-nucleotide
  modified_base (5)..(5): 2'-OMe-nucleotide
  modified_base (6)..(6): 2'-fluoro-nucleotide
  modified_base (7)..(7): 2'-OMe-nucleotide
  modified_base (8)..(8): 2'-fluoro-nucleotide
  modified_base (9)..(9): 2'-OMe-nucleotide
  modified_base (10)..(10): 2'-fluoro-nucleotide
  modified_base (11)..(11): 2'-OMe-nucleotide
  modified_base (12)..(12): 2'-fluoro-nucleotide
  modified_base (13)..(13): 2'-OMe-nucleotide
  modified_base (14)..(14): 2'-fluoro-nucleotide
  modified_base (15)..(15): 2'-OMe-nucleotide
  modified_base (16)..(16): 2'-fluoro-nucleotide
  modified_base (17)..(17): 2'-OMe-nucleotide
  modified_base (18)..(18): 2'-fluoro-nucleotide
  modified_base (19)..(19): 2'-OMe-nucleotide
  modified_base (20)..(20): 2'-fluoro-nucleotide
  modified_base (21)..(21): 2'-OMe-nucleotide
  modified_base (22)..(22): 2'-fluoro-nucleotide
  modified_base (23)..(23): Inverted nucleotide
ccaugacaccacacucgcauagt

SEQ ID NO: 671 - DNA, 23 bp, Artificial Sequence
  source: /note="Description of Artificial Sequence: Synthetic oligonucleotide"
  source: /note="Description of Combined DNA/RNA Molecule: Synthetic oligonucleotide"
  modified_base (1)..(1): 2'-OMe-nucleotide
  modified_base (2)..(2): 2'-OMe-nucleotide
  modified_base (3)..(3): 2'-OMe-nucleotide
  modified_base (4)..(4): 2'-fluoro-nucleotide
  modified_base (5)..(5): 2'-OMe-nucleotide
  modified_base (6)..(6): 2'-fluoro-nucleotide
  modified_base (7)..(7): 2'-OMe-nucleotide
  modified_base (8)..(8): 2'-fluoro-nucleotide
  modified_base (9)..(9): 2'-OMe-nucleotide
  modified_base (10)..(10): 2'-fluoro-nucleotide
  modified_base (11)..(11): 2'-OMe-nucleotide
  modified_base (12)..(12): 2'-fluoro-nucleotide
  modified_base (13)..(13): 2'-OMe-nucleotide
  modified_base (14)..(14): 2'-fluoro-nucleotide
  modified_base (15)..(15): 2'-OMe-nucleotide
  modified_base (16)..(16): 2'-fluoro-nucleotide
  modified_base (17)..(17): 2'-OMe-nucleotide
  modified_base (18)..(18): 2'-fluoro-nucleotide
  modified_base (19)..(19): 2'-OMe-nucleotide
  modified_base (20)..(20): 2'-fluoro-nucleotide
  modified_base (21)..(21): 2'-OMe-nucleotide
  modified_base (22)..(22): 2'-fluoro-nucleotide
  modified_base (23)..(23): Inverted nucleotide
ccagacaccacacucgcauagut

SEQ ID NO: 672 - DNA, 23 bp, Artificial Sequence
  source: /note="Description of Artificial Sequence: Synthetic oligonucleotide"
  source: /note="Description of Combined DNA/RNA Molecule: Synthetic oligonucleotide"
  modified_base (1)..(1): 2'-OMe-nucleotide
  modified_base (2)..(2): 2'-OMe-nucleotide
  modified_base (3)..(3): 2'-OMe-nucleotide
  modified_base (4)..(4): 2'-fluoro-nucleotide
  modified_base (5)..(5): 2'-OMe-nucleotide
  modified_base (6)..(6): 2'-fluoro-nucleotide
  modified_base (7)..(7): 2'-OMe-nucleotide
  modified_base (8)..(8): 2'-fluoro-nucleotide
  modified_base (9)..(9): 2'-OMe-nucleotide
  modified_base (10)..(10): 2'-fluoro-nucleotide
  modified_base (11)..(11): 2'-OMe-nucleotide
  modified_base (12)..(12): 2'-fluoro-nucleotide
  modified_base (13)..(13): 2'-OMe-nucleotide
  modified_base (14)..(14): 2'-fluoro-nucleotide
  modified_base (15)..(15): 2'-OMe-nucleotide
  modified_base (16)..(16): 2'-fluoro-nucleotide
  modified_base (17)..(17): 2'-OMe-nucleotide
  modified_base (18)..(18): 2'-fluoro-nucleotide
  modified_base (19)..(19): 2'-OMe-nucleotide
  modified_base (20)..(20): 2'-fluoro-nucleotide
  modified_base (21)..(21): 2'-OMe-nucleotide
  modified_base (22)..(22): 2'-fluoro-nucleotide
  modified_base (23)..(23): Inverted nucleotide
ccaacaccacacucgcauaguct

SEQ ID NO: 673 - DNA, 23 bp, Artificial Sequence
  source: /note="Description of Artificial Sequence: Synthetic oligonucleotide"
  source: /note="Description of Combined DNA/RNA Molecule: Synthetic oligonucleotide"
  modified_base (1)..(1): 2'-OMe-nucleotide
  modified_base (2)..(2): 2'-OMe-nucleotide
  modified_base (3)..(3): 2'-OMe-nucleotide
  modified_base (4)..(4): 2'-fluoro-nucleotide
  modified_base (5)..(5): 2'-OMe-nucleotide
  modified_base (6)..(6): 2'-fluoro-nucleotide
  modified_base (7)..(7): 2'-OMe-nucleotide
  modified_base (8)..(8): 2'-fluoro-nucleotide
  modified_base (9)..(9): 2'-OMe-nucleotide
  modified_base (10)..(10): 2'-fluoro-nucleotide
  modified_base (11)..(11): 2'-OMe-nucleotide
  modified_base (12)..(12): 2'-fluoro-nucleotide
  modified_base (13)..(13): 2'-OMe-nucleotide
  modified_base (14)..(14): 2'-fluoro-nucleotide
  modified_base (15)..(15): 2'-OMe-nucleotide
  modified_base (16)..(16): 2'-fluoro-nucleotide
  modified_base (17)..(17): 2'-OMe-nucleotide
  modified_base (18)..(18): 2'-fluoro-nucleotide
  modified_base (19)..(19): 2'-OMe-nucleotide
  modified_base (20)..(20): 2'-fluoro-nucleotide
  modified_base (21)..(21): 2'-OMe-nucleotide
  modified_base (22)..(22): 2'-fluoro-nucleotide
  modified_base (23)..(23): Inverted nucleotide
ccaaccacacucgcauagucggt

SEQ ID NO: 674 - DNA, 23 bp, Artificial Sequence
  source: /note="Description of Artificial Sequence: Synthetic oligonucleotide"
  source: /note="Description of Combined DNA/RNA Molecule: Synthetic oligonucleotide"
  modified_base (1)..(1): 2'-OMe-nucleotide
  modified_base (2)..(2): 2'-OMe-nucleotide
  modified_base (3)..(3): 2'-OMe-nucleotide
  modified_base (4)..(4): 2'-fluoro-nucleotide
  modified_base (5)..(5): 2'-OMe-nucleotide
  modified_base (6)..(6): 2'-fluoro-nucleotide
  modified_base (7)..(7): 2'-OMe-nucleotide
  modified_base (8)..(8): 2'-fluoro-nucleotide
  modified_base (9)..(9): 2'-OMe-nucleotide
  modified_base (10)..(10): 2'-fluoro-nucleotide
  modified_base (11)..(11): 2'-OMe-nucleotide
  modified_base (12)..(12): 2'-fluoro-nucleotide
  modified_base (13)..(13): 2'-OMe-nucleotide
  modified_base (14)..(14): 2'-fluoro-nucleotide
  modified_base (15)..(15): 2'-OMe-nucleotide
  modified_base (16)..(16): 2'-fluoro-nucleotide
  modified_base (17)..(17): 2'-OMe-nucleotide
  modified_base (18)..(18): 2'-fluoro-nucleotide
  modified_base (19)..(19): 2'-OMe-nucleotide
  modified_base (20)..(20): 2'-fluoro-nucleotide
  modified_base (21)..(21): 2'-OMe-nucleotide
  modified_base (22)..(22): 2'-fluoro-nucleotide
  modified_base (23)..(23): Inverted nucleotide
ccaccacacucgcauagucggat

SEQ ID NO: 675 - DNA, 23 bp, Artificial Sequence
  source: /note="Description of Artificial Sequence: Synthetic oligonucleotide"
  source: /note="Description of Combined DNA/RNA Molecule: Synthetic oligonucleotide"
  modified_base (1)..(1): 2'-OMe-nucleotide
  modified_base (2)..(2): 2'-OMe-nucleotide
  modified_base (3)..(3): 2'-OMe-nucleotide
  modified_base (4)..(4): 2'-fluoro-nucleotide
  modified_base (5)..(5): 2'-OMe-nucleotide
  modified_base (6)..(6): 2'-fluoro-nucleotide
  modified_base (7)..(7): 2'-OMe-nucleotide
  modified_base (8)..(8): 2'-fluoro-nucleotide
  modified_base (9)..(9): 2'-OMe-nucleotide
  modified_base (10)..(10): 2'-fluoro-nucleotide
  modified_base (11)..(11): 2'-OMe-nucleotide
  modified_base (12)..(12): 2'-fluoro-nucleotide
  modified_base (13)..(13): 2'-OMe-nucleotide
  modified_base (14)..(14): 2'-fluoro-nucleotide
  modified_base (15)..(15): 2'-OMe-nucleotide
  modified_base (16)..(16): 2'-fluoro-nucleotide
  modified_base (17)..(17): 2'-OMe-nucleotide
  modified_base (18)..(18): 2'-fluoro-nucleotide
  modified_base (19)..(19): 2'-OMe-nucleotide
  modified_base (20)..(20): 2'-fluoro-nucleotide
  modified_base (21)..(21): 2'-OMe-nucleotide
  modified_base (22)..(22): 2'-fluoro-nucleotide
  modified_base (23)..(23): Inverted nucleotide
ccacacacucgcauagucggact

SEQ ID NO: 676 - DNA, 23 bp, Artificial Sequence
  source: /note="Description of Artificial Sequence: Synthetic oligonucleotide"
  source: /note="Description of Combined DNA/RNA Molecule: Synthetic oligonucleotide"
  modified_base (1)..(1): 2'-OMe-nucleotide
  modified_base (2)..(2): 2'-OMe-nucleotide
  modified_base (3)..(3): 2'-OMe-nucleotide
  modified_base (4)..(4): 2'-fluoro-nucleotide
  modified_base (5)..(5): 2'-OMe-nucleotide
  modified_base (6)..(6): 2'-fluoro-nucleotide
  modified_base (7)..(7): 2'-OMe-nucleotide
  modified_base (8)..(8): 2'-fluoro-nucleotide
  modified_base (9)..(9): 2'-OMe-nucleotide
  modified_base (10)..(10): 2'-fluoro-nucleotide
  modified_base (11)..(11): 2'-OMe-nucleotide
  modified_base (12)..(12): 2'-fluoro-nucleotide
  modified_base (13)..(13): 2'-OMe-nucleotide
  modified_base (14)..(14): 2'-fluoro-nucleotide
  modified_base (15)..(15): 2'-OMe-nucleotide
  modified_base (16)..(16): 2'-fluoro-nucleotide
  modified_base (17)..(17): 2'-OMe-nucleotide
  modified_base (18)..(18): 2'-fluoro-nucleotide
  modified_base (19)..(19): 2'-OMe-nucleotide
  modified_base (20)..(20): 2'-fluoro-nucleotide
  modified_base (21)..(21): 2'-OMe-nucleotide
  modified_base (22)..(22): 2'-fluoro-nucleotide
  modified_base (23)..(23): Inverted nucleotide
ccaacacucgcauagucggacct

SEQ ID NO: 677 - DNA, 23 bp, Artificial Sequence
  source: /note="Description of Artificial Sequence: Synthetic oligonucleotide"
  source: /note="Description of Combined DNA/RNA Molecule: Synthetic oligonucleotide"
  modified_base (1)..(1): 2'-OMe-nucleotide
  modified_base (2)..(2): 2'-OMe-nucleotide
  modified_base (3)..(3): 2'-OMe-nucleotide
  modified_base (4)..(4): 2'-fluoro-nucleotide
  modified_base (5)..(5): 2'-OMe-nucleotide
  modified_base (6)..(6): 2'-fluoro-nucleotide
  modified_base (7)..(7): 2'-OMe-nucleotide
  modified_base (8)..(8): 2'-fluoro-nucleotide
  modified_base (9)..(9): 2'-OMe-nucleotide
  modified_base (10)..(10): 2'-fluoro-nucleotide
  modified_base (11)..(11): 2'-OMe-nucleotide
  modified_base (12)..(12): 2'-fluoro-nucleotide
  modified_base (13)..(13): 2'-OMe-nucleotide
  modified_base (14)..(14): 2'-fluoro-nucleotide
  modified_base (15)..(15): 2'-OMe-nucleotide
  modified_base (16)..(16): 2'-fluoro-nucleotide
  modified_base (17)..(17): 2'-OMe-nucleotide
  modified_base (18)..(18): 2'-fluoro-nucleotide
  modified_base (19)..(19): 2'-OMe-nucleotide
  modified_base (20)..(20): 2'-fluoro-nucleotide
  modified_base (21)..(21): 2'-OMe-nucleotide
  modified_base (22)..(22): 2'-fluoro-nucleotide
  modified_base (23)..(23): Inverted nucleotide
ccacauagucggaccccagaaut

SEQ ID NO: 678 - DNA, 23 bp, Artificial Sequence
  source: /note="Description of Artificial Sequence: Synthetic oligonucleotide"
  source: /note="Description of Combined DNA/RNA Molecule: Synthetic oligonucleotide"
  modified_base (1)..(1): 2'-OMe-nucleotide
  modified_base (2)..(2): 2'-OMe-nucleotide
  modified_base (3)..(3): 2'-OMe-nucleotide
  modified_base (4)..(4): 2'-fluoro-nucleotide
  modified_base (5)..(5): 2'-OMe-nucleotide
  modified_base (6)..(6): 2'-fluoro-nucleotide
  modified_base (7)..(7): 2'-OMe-nucleotide
  modified_base (8)..(8): 2'-fluoro-nucleotide
  modified_base (9)..(9): 2'-OMe-nucleotide
  modified_base (10)..(10): 2'-fluoro-nucleotide
  modified_base (11)..(11): 2'-OMe-nucleotide
  modified_base (12)..(12): 2'-fluoro-nucleotide
  modified_base (13)..(13): 2'-OMe-nucleotide
  modified_base (14)..(14): 2'-fluoro-nucleotide
  modified_base (15)..(15): 2'-OMe-nucleotide
  modified_base (16)..(16): 2'-fluoro-nucleotide
  modified_base (17)..(17): 2'-OMe-nucleotide
  modified_base (18)..(18): 2'-fluoro-nucleotide
  modified_base (19)..(19): 2'-OMe-nucleotide
  modified_base (20)..(20): 2'-fluoro-nucleotide
  modified_base (21)..(21): 2'-OMe-nucleotide
  modified_base (22)..(22): 2'-fluoro-nucleotide
  modified_base (23)..(23): Inverted nucleotide
ccaauagucggaccccagaauat

SEQ ID NO: 679 - DNA, 23 bp, Artificial Sequence
  source: /note="Description of Artificial Sequence: Synthetic oligonucleotide"
  source: /note="Description of Combined DNA/RNA Molecule: Synthetic oligonucleotide"
  modified_base (1)..(1): 2'-OMe-nucleotide
  modified_base (2)..(2): 2'-OMe-nucleotide
  modified_base (3)..(3): 2'-OMe-nucleotide
  modified_base (4)..(4): 2'-fluoro-nucleotide
  modified_base (5)..(5): 2'-OMe-nucleotide
  modified_base (6)..(6): 2'-fluoro-nucleotide
  modified_base (7)..(7): 2'-OMe-nucleotide
  modified_base (8)..(8): 2'-fluoro-nucleotide
  modified_base (9)..(9): 2'-OMe-nucleotide
  modified_base (10)..(10): 2'-fluoro-nucleotide
  modified_base (11)..(11): 2'-OMe-nucleotide
  modified_base (12)..(12): 2'-fluoro-nucleotide
  modified_base (13)..(13): 2'-OMe-nucleotide
  modified_base (14)..(14): 2'-fluoro-nucleotide
  modified_base (15)..(15): 2'-OMe-nucleotide
  modified_base (16)..(16): 2'-fluoro-nucleotide
  modified_base (17)..(17): 2'-OMe-nucleotide
  modified_base (18)..(18): 2'-fluoro-nucleotide
  modified_base (19)..(19): 2'-OMe-nucleotide
  modified_base (20)..(20): 2'-fluoro-nucleotide
  modified_base (21)..(21): 2'-OMe-nucleotide
  modified_base (22)..(22): 2'-fluoro-nucleotide
  modified_base (23)..(23): Inverted nucleotide
ccauagucggaccccagaauact

SEQ ID NO: 680 - DNA, 23 bp, Artificial Sequence
  source: /note="Description of Artificial Sequence: Synthetic oligonucleotide"
  source: /note="Description of Combined DNA/RNA Molecule: Synthetic oligonucleotide"
  modified_base (1)..(1): 2'-OMe-nucleotide
  modified_base (2)..(2): 2'-OMe-nucleotide
  modified_base (3)..(3): 2'-OMe-nucleotide
  modified_base (4)..(4): 2'-fluoro-nucleotide
  modified_base (5)..(5): 2'-OMe-nucleotide
  modified_base (6)..(6): 2'-fluoro-nucleotide
  modified_base (7)..(7): 2'-OMe-nucleotide
  modified_base (8)..(8): 2'-fluoro-nucleotide
  modified_base (9)..(9): 2'-OMe-nucleotide
  modified_base (10)..(10): 2'-fluoro-nucleotide
  modified_base (11)..(11): 2'-OMe-nucleotide
  modified_base (12)..(12): 2'-fluoro-nucleotide
  modified_base (13)..(13): 2'-OMe-nucleotide
  modified_base (14)..(14): 2'-fluoro-nucleotide
  modified_base (15)..(15): 2'-OMe-nucleotide
  modified_base (16)..(16): 2'-fluoro-nucleotide
  modified_base (17)..(17): 2'-OMe-nucleotide
  modified_base (18)..(18): 2'-fluoro-nucleotide
  modified_base (19)..(19): 2'-OMe-nucleotide
  modified_base (20)..(20): 2'-fluoro-nucleotide
  modified_base (21)..(21): 2'-OMe-nucleotide
  modified_base (22)..(22): 2'-fluoro-nucleotide
  modified_base (23)..(23): Inverted nucleotide
ccaagucggaccccagaauacut

SEQ ID NO: 681 - DNA, 23 bp, Artificial Sequence
  source: /note="Description of Artificial Sequence: Synthetic oligonucleotide"
  source: /note="Description of Combined DNA/RNA Molecule: Synthetic oligonucleotide"
  modified_base (1)..(1): 2'-OMe-nucleotide
  modified_base (2)..(2): 2'-OMe-nucleotide
  modified_base (3)..(3): 2'-OMe-nucleotide
  modified_base (4)..(4): 2'-fluoro-nucleotide
  modified_base (5)..(5): 2'-OMe-nucleotide
  modified_base (6)..(6): 2'-fluoro-nucleotide
  modified_base (7)..(7): 2'-OMe-nucleotide
  modified_base (8)..(8): 2'-fluoro-nucleotide
  modified_base (9)..(9): 2'-OMe-nucleotide
  modified_base (10)..(10): 2'-fluoro-nucleotide
  modified_base (11)..(11): 2'-OMe-nucleotide
  modified_base (12)..(12): 2'-fluoro-nucleotide
  modified_base (13)..(13): 2'-OMe-nucleotide
  modified_base (14)..(14): 2'-fluoro-nucleotide
  modified_base (15)..(15): 2'-OMe-nucleotide
  modified_base (16)..(16): 2'-fluoro-nucleotide
  modified_base (17)..(17): 2'-OMe-nucleotide
  modified_base (18)..(18): 2'-fluoro-nucleotide
  modified_base (19)..(19): 2'-OMe-nucleotide
  modified_base (20)..(20): 2'-fluoro-nucleotide
  modified_base (21)..(21): 2'-OMe-nucleotide
  modified_base (22)..(22): 2'-fluoro-nucleotide
  modified_base (23)..(23): Inverted nucleotide
ccagucggaccccagaauacuat

SEQ ID NO: 682 - DNA, 23 bp, Artificial Sequence
  source: /note="Description of Artificial Sequence: Synthetic oligonucleotide"
  source: /note="Description of Combined DNA/RNA Molecule: Synthetic oligonucleotide"
  modified_base (1)..(1): 2'-OMe-nucleotide
  modified_base (2)..(2): 2'-OMe-nucleotide
  modified_base (3)..(3): 2'-OMe-nucleotide
  modified_base (4)..(4): 2'-fluoro-nucleotide
  modified_base (5)..(5): 2'-OMe-nucleotide
  modified_base (6)..(6): 2'-fluoro-nucleotide
  modified_base (7)..(7): 2'-OMe-nucleotide
  modified_base (8)..(8): 2'-fluoro-nucleotide
  modified_base (9)..(9): 2'-OMe-nucleotide
  modified_base (10)..(10): 2'-fluoro-nucleotide
  modified_base (11)..(11): 2'-OMe-nucleotide
  modified_base (12)..(12): 2'-fluoro-nucleotide
  modified_base (13)..(13): 2'-OMe-nucleotide
  modified_base (14)..(14): 2'-fluoro-nucleotide
  modified_base (15)..(15): 2'-OMe-nucleotide
  modified_base (16)..(16): 2'-fluoro-nucleotide
  modified_base (17)..(17): 2'-OMe-nucleotide
  modified_base (18)..(18): 2'-fluoro-nucleotide
  modified_base (19)..(19): 2'-OMe-nucleotide
  modified_base (20)..(20): 2'-fluoro-nucleotide
  modified_base (21)..(21): 2'-OMe-nucleotide
  modified_base (22)..(22): 2'-fluoro-nucleotide
  modified_base (23)..(23): Inverted nucleotide
ccaucggaccccagaauacuact

SEQ ID NO: 683 - DNA, 23 bp, Artificial Sequence
  source: /note="Description of Artificial Sequence: Synthetic oligonucleotide"
  source: /note="Description of Combined DNA/RNA Molecule: Synthetic oligonucleotide"
  modified_base (1)..(1): 2'-OMe-nucleotide
  modified_base (2)..(2): 2'-OMe-nucleotide
  modified_base (3)..(3): 2'-OMe-nucleotide
  modified_base (4)..(4): 2'-fluoro-nucleotide
  modified_base (5)..(5): 2'-OMe-nucleotide
  modified_base (6)..(6): 2'-fluoro-nucleotide
  modified_base (7)..(7): 2'-OMe-nucleotide
  modified_base (8)..(8): 2'-fluoro-nucleotide
  modified_base (9)..(9): 2'-OMe-nucleotide
  modified_base (10)..(10): 2'-fluoro-nucleotide
  modified_base (11)..(11): 2'-OMe-nucleotide
  modified_base (12)..(12): 2'-fluoro-nucleotide
  modified_base (13)..(13): 2'-OMe-nucleotide
  modified_base (14)..(14): 2'-fluoro-nucleotide
  modified_base (15)..(15): 2'-OMe-nucleotide
  modified_base (16)..(16): 2'-fluoro-nucleotide
  modified_base (17)..(17): 2'-OMe-nucleotide
  modified_base (18)..(18): 2'-fluoro-nucleotide
  modified_base (19)..(19): 2'-OMe-nucleotide
  modified_base (20)..(20): 2'-fluoro-nucleotide
  modified_base (21)..(21): 2'-OMe-nucleotide
  modified_base (22)..(22): 2'-fluoro-nucleotide
  modified_base (23)..(23): Inverted nucleotide
ccacggaccccagaauacuacct

SEQ ID NO: 684 - DNA, 23 bp, Artificial Sequence
  source: /note="Description of Artificial Sequence: Synthetic oligonucleotide"
  source: /note="Description of Combined DNA/RNA Molecule: Synthetic oligonucleotide"
  modified_base (1)..(1): 2'-OMe-nucleotide
  modified_base (2)..(2): 2'-OMe-nucleotide
  modified_base (3)..(3): 2'-OMe-nucleotide
  modified_base (4)..(4): 2'-fluoro-nucleotide
  modified_base (5)..(5): 2'-OMe-nucleotide
  modified_base (6)..(6): 2'-fluoro-nucleotide
  modified_base (7)..(7): 2'-OMe-nucleotide
  modified_base (8)..(8): 2'-fluoro-nucleotide
  modified_base (9)..(9): 2'-OMe-nucleotide
  modified_base (10)..(10): 2'-fluoro-nucleotide
  modified_base (11)..(11): 2'-OMe-nucleotide
  modified_base (12)..(12): 2'-fluoro-nucleotide
  modified_base (13)..(13): 2'-OMe-nucleotide
  modified_base (14)..(14): 2'-fluoro-nucleotide
  modified_base (15)..(15): 2'-OMe-nucleotide
  modified_base (16)..(16): 2'-fluoro-nucleotide
  modified_base (17)..(17): 2'-OMe-nucleotide
  modified_base (18)..(18): 2'-fluoro-nucleotide
  modified_base (19)..(19): 2'-OMe-nucleotide
  modified_base (20)..(20): 2'-fluoro-nucleotide
  modified_base (21)..(21): 2'-OMe-nucleotide
  modified_base (22)..(22): 2'-fluoro-nucleotide
  modified_base (23)..(23): Inverted nucleotide
ccaacaagcaccgacugagcagt

SEQ ID NO: 685 - DNA, 23 bp, Artificial Sequence
  source: /note="Description of Artificial Sequence: Synthetic oligonucleotide"
  source: /note="Description of Combined DNA/RNA Molecule: Synthetic oligonucleotide"
  modified_base (1)..(1): 2'-OMe-nucleotide
  modified_base (2)..(2): 2'-OMe-nucleotide
  modified_base (3)..(3): 2'-OMe-nucleotide
  modified_base (4)..(4): 2'-fluoro-nucleotide
  modified_base (5)..(5): 2'-OMe-nucleotide
  modified_base (6)..(6): 2'-fluoro-nucleotide
  modified_base (7)..(7): 2'-OMe-nucleotide
  modified_base (8)..(8): 2'-fluoro-nucleotide
  modified_base (9)..(9): 2'-OMe-nucleotide
  modified_base (10)..(10): 2'-fluoro-nucleotide
  modified_base (11)..(11): 2'-OMe-nucleotide
  modified_base (12)..(12): 2'-fluoro-nucleotide
  modified_base (13)..(13): 2'-OMe-nucleotide
  modified_base (14)..(14): 2'-fluoro-nucleotide
  modified_base (15)..(15): 2'-OMe-nucleotide
  modified_base (16)..(16): 2'-fluoro-nucleotide
  modified_base (17)..(17): 2'-OMe-nucleotide
  modified_base (18)..(18): 2'-fluoro-nucleotide
  modified_base (19)..(19): 2'-OMe-nucleotide
  modified_base (20)..(20): 2'-fluoro-nucleotide
  modified_base (21)..(21): 2'-OMe-nucleotide
  modified_base (22)..(22): 2'-fluoro-nucleotide
  modified_base (23)..(23): Inverted nucleotide
ccaaagcaccgacugagcagagt

SEQ ID NO: 686 - DNA, 23 bp, Artificial Sequence
  source: /note="Description of Artificial Sequence: Synthetic oligonucleotide"
  source: /note="Description of Combined DNA/RNA Molecule: Synthetic oligonucleotide"
  modified_base (1)..(1): 2'-OMe-nucleotide
  modified_base (2)..(2): 2'-OMe-nucleotide
  modified_base (3)..(3): 2'-OMe-nucleotide
  modified_base (4)..(4): 2'-fluoro-nucleotide
  modified_base (5)..(5): 2'-OMe-nucleotide
  modified_base (6)..(6): 2'-fluoro-nucleotide
  modified_base (7)..(7): 2'-OMe-nucleotide
  modified_base (8)..(8): 2'-fluoro-nucleotide
  modified_base (9)..(9): 2'-OMe-nucleotide
  modified_base (10)..(10): 2'-fluoro-nucleotide
  modified_base (11)..(11): 2'-OMe-nucleotide
  modified_base (12)..(12): 2'-fluoro-nucleotide
  modified_base (13)..(13): 2'-OMe-nucleotide
  modified_base (14)..(14): 2'-fluoro-nucleotide
  modified_base (15)..(15): 2'-OMe-nucleotide
  modified_base (16)..(16): 2'-fluoro-nucleotide
  modified_base (17)..(17): 2'-OMe-nucleotide
  modified_base (18)..(18): 2'-fluoro-nucleotide
  modified_base (19)..(19): 2'-OMe-nucleotide
  modified_base (20)..(20): 2'-fluoro-nucleotide
  modified_base (21)..(21): 2'-OMe-nucleotide
  modified_base (22)..(22): 2'-fluoro-nucleotide
  modified_base (23)..(23): Inverted nucleotide
ccacacgguaauggacagaguut

SEQ ID NO: 687 - DNA, 23 bp, Artificial Sequence
  source: /note="Description of Artificial Sequence: Synthetic oligonucleotide"
  source: /note="Description of Combined DNA/RNA Molecule: Synthetic oligonucleotide"
  modified_base (1)..(1): 2'-OMe-nucleotide
  modified_base (2)..(2): 2'-OMe-nucleotide
  modified_base (3)..(3): 2'-OMe-nucleotide
  modified_base (4)..(4): 2'-fluoro-nucleotide
  modified_base (5)..(5): 2'-OMe-nucleotide
  modified_base (6)..(6): 2'-fluoro-nucleotide
  modified_base (7)..(7): 2'-OMe-nucleotide
  modified_base (8)..(8): 2'-fluoro-nucleotide
  modified_base (9)..(9): 2'-OMe-nucleotide
  modified_base (10)..(10): 2'-fluoro-nucleotide
  modified_base (11)..(11): 2'-OMe-nucleotide
  modified_base (12)..(12): 2'-fluoro-nucleotide
  modified_base (13)..(13): 2'-OMe-nucleotide
  modified_base (14)..(14): 2'-fluoro-nucleotide
  modified_base (15)..(15): 2'-OMe-nucleotide
  modified_base (16)..(16): 2'-fluoro-nucleotide
  modified_base (17)..(17): 2'-OMe-nucleotide
  modified_base (18)..(18): 2'-fluoro-nucleotide
  modified_base (19)..(19): 2'-OMe-nucleotide
  modified_base (20)..(20): 2'-fluoro-nucleotide
  modified_base (21)..(21): 2'-OMe-nucleotide
  modified_base (22)..(22): 2'-fluoro-nucleotide
  modified_base (23)..(23): Inverted nucleotide
ccaacgguaauggacagaguuat

SEQ ID NO: 688 - DNA, 23 bp, Artificial Sequence
  source: /note="Description of Artificial Sequence: Synthetic oligonucleotide"
  source: /note="Description of Combined DNA/RNA Molecule: Synthetic oligonucleotide"
  modified_base (1)..(1): 2'-OMe-nucleotide
  modified_base (2)..(2): 2'-OMe-nucleotide
  modified_base (3)..(3): 2'-OMe-nucleotide
  modified_base (4)..(4): 2'-fluoro-nucleotide
  modified_base (5)..(5): 2'-OMe-nucleotide
  modified_base (6)..(6): 2'-fluoro-nucleotide
  modified_base (7)..(7): 2'-OMe-nucleotide
  modified_base (8)..(8): 2'-fluoro-nucleotide
  modified_base (9)..(9): 2'-OMe-nucleotide
  modified_base (10)..(10): 2'-fluoro-nucleotide
  modified_base (11)..(11): 2'-OMe-nucleotide
  modified_base (12)..(12): 2'-fluoro-nucleotide
  modified_base (13)..(13): 2'-OMe-nucleotide
  modified_base (14)..(14): 2'-fluoro-nucleotide
  modified_base (15)..(15): 2'-OMe-nucleotide
  modified_base (16)..(16): 2'-fluoro-nucleotide
  modified_base (17)..(17): 2'-OMe-nucleotide
  modified_base (18)..(18): 2'-fluoro-nucleotide
  modified_base (19)..(19): 2'-OMe-nucleotide
  modified_base (20)..(20): 2'-fluoro-nucleotide
  modified_base (21)..(21): 2'-OMe-nucleotide
  modified_base (22)..(22): 2'-fluoro-nucleotide
  modified_base (23)..(23): Inverted nucleotide
ccacgguaauggacagaguuaut

SEQ ID NO: 689 - DNA, 23 bp, Artificial Sequence
  source: /note="Description of Artificial Sequence: Synthetic oligonucleotide"
  source: /note="Description of Combined DNA/RNA Molecule: Synthetic oligonucleotide"
  modified_base (1)..(1): 2'-OMe-nucleotide
  modified_base (2)..(2): 2'-OMe-nucleotide
  modified_base (3)..(3): 2'-OMe-nucleotide
  modified_base (4)..(4): 2'-fluoro-nucleotide
  modified_base (5)..(5): 2'-OMe-nucleotide
  modified_base (6)..(6): 2'-fluoro-nucleotide
  modified_base (7)..(7): 2'-OMe-nucleotide
  modified_base (8)..(8): 2'-fluoro-nucleotide
  modified_base (9)..(9): 2'-OMe-nucleotide
  modified_base (10)..(10): 2'-fluoro-nucleotide
  modified_base (11)..(11): 2'-OMe-nucleotide
  modified_base (12)..(12): 2'-fluoro-nucleotide
  modified_base (13)..(13): 2'-OMe-nucleotide
  modified_base (14)..(14): 2'-fluoro-nucleotide
  modified_base (15)..(15): 2'-OMe-nucleotide
  modified_base (16)..(16): 2'-fluoro-nucleotide
  modified_base (17)..(17): 2'-OMe-nucleotide
  modified_base (18)..(18): 2'-fluoro-nucleotide
  modified_base (19)..(19): 2'-OMe-nucleotide
  modified_base (20)..(20): 2'-fluoro-nucleotide
  modified_base (21)..(21): 2'-OMe-nucleotide
  modified_base (22)..(22): 2'-fluoro-nucleotide
  modified_base (23)..(23): Inverted nucleotide
ccauuaccccgauuccaagccut

SEQ ID NO: 690 - DNA, 23 bp, Artificial Sequence
  source: /note="Description of Artificial Sequence: Synthetic oligonucleotide"
  source: /note="Description of Combined DNA/RNA Molecule: Synthetic oligonucleotide"
  modified_base (1)..(1): 2'-OMe-nucleotide
  modified_base (2)..(2): 2'-OMe-nucleotide
  modified_base (3)..(3): 2'-OMe-nucleotide
  modified_base (4)..(4): 2'-fluoro-nucleotide
  modified_base (5)..(5): 2'-OMe-nucleotide
  modified_base (6)..(6): 2'-fluoro-nucleotide
  modified_base (7)..(7): 2'-OMe-nucleotide
  modified_base (8)..(8): 2'-fluoro-nucleotide
  modified_base (9)..(9): 2'-OMe-nucleotide
  modified_base (10)..(10): 2'-fluoro-nucleotide
  modified_base (11)..(11): 2'-OMe-nucleotide
  modified_base (12)..(12): 2'-fluoro-nucleotide
  modified_base (13)..(13): 2'-OMe-nucleotide
  modified_base (14)..(14): 2'-fluoro-nucleotide
  modified_base (15)..(15): 2'-OMe-nucleotide
  modified_base (16)..(16): 2'-fluoro-nucleotide
  modified_base (17)..(17): 2'-OMe-nucleotide
  modified_base (18)..(18): 2'-fluoro-nucleotide
  modified_base (19)..(19): 2'-OMe-nucleotide
  modified_base (20)..(20): 2'-fluoro-nucleotide
  modified_base (21)..(21): 2'-OMe-nucleotide
  modified_base (22)..(22): 2'-fluoro-nucleotide
  modified_base (23)..(23): Inverted nucleotide
ccauaccccgauuccaagccuat

SEQ ID NO: 691 - DNA, 23 bp, Artificial Sequence
  source: /note="Description of Artificial Sequence: Synthetic oligonucleotide"
  source: /note="Description of Combined DNA/RNA Molecule: Synthetic oligonucleotide"
  modified_base (1)..(1): 2'-OMe-nucleotide
  modified_base (2)..(2): 2'-OMe-nucleotide
  modified_base (3)..(3): 2'-OMe-nucleotide
  modified_base (4)..(4): 2'-fluoro-nucleotide
  modified_base (5)..(5): 2'-OMe-nucleotide
  modified_base (6)..(6): 2'-fluoro-nucleotide
  modified_base (7)..(7): 2'-OMe-nucleotide
  modified_base (8)..(8): 2'-fluoro-nucleotide
  modified_base (9)..(9): 2'-OMe-nucleotide
  modified_base (10)..(10): 2'-fluoro-nucleotide
  modified_base (11)..(11): 2'-OMe-nucleotide
  modified_base (12)..(12): 2'-fluoro-nucleotide
  modified_base (13)..(13): 2'-OMe-nucleotide
  modified_base (14)..(14): 2'-fluoro-nucleotide
  modified_base (15)..(15): 2'-OMe-nucleotide
  modified_base (16)..(16): 2'-fluoro-nucleotide
  modified_base (17)..(17): 2'-OMe-nucleotide
  modified_base (18)..(18): 2'-fluoro-nucleotide
  modified_base (19)..(19): 2'-OMe-nucleotide
  modified_base (20)..(20): 2'-fluoro-nucleotide
  modified_base (21)..(21): 2'-OMe-nucleotide
  modified_base (22)..(22): 2'-fluoro-nucleotide
  modified_base (23)..(23): Inverted nucleotide
ccaaccccgauuccaagccuagt

SEQ ID NO: 692 - DNA, 23 bp, Artificial Sequence
  source: /note="Description of Artificial Sequence: Synthetic oligonucleotide"
  source: /note="Description of Combined DNA/RNA Molecule: Synthetic oligonucleotide"
  modified_base (1)..(1): 2'-OMe-nucleotide
  modified_base (2)..(2): 2'-OMe-nucleotide
  modified_base (3)..(3): 2'-OMe-nucleotide
  modified_base (4)..(4): 2'-fluoro-nucleotide
  modified_base (5)..(5): 2'-OMe-nucleotide
  modified_base (6)..(6): 2'-fluoro-nucleotide
  modified_base (7)..(7): 2'-OMe-nucleotide
  modified_base (8)..(8): 2'-fluoro-nucleotide
  modified_base (9)..(9): 2'-OMe-nucleotide
  modified_base (10)..(10): 2'-fluoro-nucleotide
  modified_base (11)..(11): 2'-OMe-nucleotide
  modified_base (12)..(12): 2'-fluoro-nucleotide
  modified_base (13)..(13): 2'-OMe-nucleotide
  modified_base (14)..(14): 2'-fluoro-nucleotide
  modified_base (15)..(15): 2'-OMe-nucleotide
  modified_base (16)..(16): 2'-fluoro-nucleotide
  modified_base (17)..(17): 2'-OMe-nucleotide
  modified_base (18)..(18): 2'-fluoro-nucleotide
  modified_base (19)..(19): 2'-OMe-nucleotide
  modified_base (20)..(20): 2'-fluoro-nucleotide
  modified_base (21)..(21): 2'-OMe-nucleotide
  modified_base (22)..(22): 2'-fluoro-nucleotide
  modified_base (23)..(23): Inverted nucleotide
ccaccccgauuccaagccuagat

SEQ ID NO: 693 - DNA, 23 bp, Artificial Sequence
  source: /note="Description of Artificial Sequence: Synthetic oligonucleotide"
  source: /note="Description of Combined DNA/RNA Molecule: Synthetic oligonucleotide"
  modified_base (1)..(1): 2'-OMe-nucleotide
  modified_base (2)..(2): 2'-OMe-nucleotide
  modified_base (3)..(3): 2'-OMe-nucleotide
  modified_base (4)..(4): 2'-fluoro-nucleotide
  modified_base (5)..(5): 2'-OMe-nucleotide
  modified_base (6)..(6): 2'-fluoro-nucleotide
  modified_base (7)..(7): 2'-OMe-nucleotide
  modified_base (8)..(8): 2'-fluoro-nucleotide
  modified_base (9)..(9): 2'-OMe-nucleotide
  modified_base (10)..(10): 2'-fluoro-nucleotide
  modified_base (11)..(11): 2'-OMe-nucleotide
  modified_base (12)..(12): 2'-fluoro-nucleotide
  modified_base (13)..(13): 2'-OMe-nucleotide
  modified_base (14)..(14): 2'-fluoro-nucleotide
  modified_base (15)..(15): 2'-OMe-nucleotide
  modified_base (16)..(16): 2'-fluoro-nucleotide
  modified_base (17)..(17): 2'-OMe-nucleotide
  modified_base (18)..(18): 2'-fluoro-nucleotide
  modified_base (19)..(19): 2'-OMe-nucleotide
  modified_base (20)..(20): 2'-fluoro-nucleotide
  modified_base (21)..(21): 2'-OMe-nucleotide
  modified_base (22)..(22): 2'-fluoro-nucleotide
  modified_base (23)..(23): Inverted nucleotide
ccacccgauuccaagccuagagt

SEQ ID NO: 694 - DNA, 23 bp, Artificial Sequence
  source: /note="Description of Artificial Sequence: Synthetic oligonucleotide"
  source: /note="Description of Combined DNA/RNA Molecule: Synthetic oligonucleotide"
  modified_base (1)..(1): 2'-OMe-nucleotide
  modified_base (2)..(2): 2'-OMe-nucleotide
  modified_base (3)..(3): 2'-OMe-nucleotide
  modified_base (4)..(4): 2'-fluoro-nucleotide
  modified_base (5)..(5): 2'-OMe-nucleotide
  modified_base (6)..(6): 2'-fluoro-nucleotide
  modified_base (7)..(7): 2'-OMe-nucleotide
  modified_base (8)..(8): 2'-fluoro-nucleotide
  modified_base (9)..(9): 2'-OMe-nucleotide
  modified_base (10)..(10): 2'-fluoro-nucleotide
  modified_base (11)..(11): 2'-OMe-nucleotide
  modified_base (12)..(12): 2'-fluoro-nucleotide
  modified_base (13)..(13): 2'-OMe-nucleotide
  modified_base (14)..(14): 2'-fluoro-nucleotide
  modified_base (15)..(15): 2'-OMe-nucleotide
  modified_base (16)..(16): 2'-fluoro-nucleotide
  modified_base (17)..(17): 2'-OMe-nucleotide
  modified_base (18)..(18): 2'-fluoro-nucleotide
  modified_base (19)..(19): 2'-OMe-nucleotide
  modified_base (20)..(20): 2'-fluoro-nucleotide
  modified_base (21)..(21): 2'-OMe-nucleotide
  modified_base (22)..(22): 2'-fluoro-nucleotide
  modified_base (23)..(23): Inverted nucleotide
ccaccgauuccaagccuagaggt

SEQ ID NO: 695 - DNA, 23 bp, Artificial Sequence
  source: /note="Description of Artificial Sequence: Synthetic oligonucleotide"
  source: /note="Description of Combined DNA/RNA Molecule: Synthetic oligonucleotide"
  modified_base (1)..(1): 2'-OMe-nucleotide
  modified_base (2)..(2): 2'-OMe-nucleotide
  modified_base (3)..(3): 2'-OMe-nucleotide
  modified_base (4)..(4): 2'-fluoro-nucleotide
  modified_base (5)..(5): 2'-OMe-nucleotide
  modified_base (6)..(6): 2'-fluoro-nucleotide
  modified_base (7)..(7): 2'-OMe-nucleotide
  modified_base (8)..(8): 2'-fluoro-nucleotide
  modified_base (9)..(9): 2'-OMe-nucleotide
  modified_base (10)..(10): 2'-fluoro-nucleotide
  modified_base (11)..(11): 2'-OMe-nucleotide
  modified_base (12)..(12): 2'-fluoro-nucleotide
  modified_base (13)..(13): 2'-OMe-nucleotide
  modified_base (14)..(14): 2'-fluoro-nucleotide
  modified_base (15)..(15): 2'-OMe-nucleotide
  modified_base (16)..(16): 2'-fluoro-nucleotide
  modified_base (17)..(17): 2'-OMe-nucleotide
  modified_base (18)..(18): 2'-fluoro-nucleotide
  modified_base (19)..(19): 2'-OMe-nucleotide
  modified_base (20)..(20): 2'-fluoro-nucleotide
  modified_base (21)..(21): 2'-OMe-nucleotide
  modified_base (22)..(22): 2'-fluoro-nucleotide
  modified_base (23)..(23): Inverted nucleotide
ccacgauuccaagccuagaggct

SEQ ID NO: 696 - DNA, 23 bp, Artificial Sequence
  source: /note="Description of Artificial Sequence: Synthetic oligonucleotide"
  source: /note="Description of Combined DNA/RNA Molecule: Synthetic oligonucleotide"
  modified_base (1)..(1): 2'-OMe-nucleotide
  modified_base (2)..(2): 2'-OMe-nucleotide
  modified_base (3)..(3): 2'-OMe-nucleotide
  modified_base (4)..(4): 2'-fluoro-nucleotide
  modified_base (5)..(5): 2'-OMe-nucleotide
  modified_base (6)..(6): 2'-fluoro-nucleotide
  modified_base (7)..(7): 2'-OMe-nucleotide
  modified_base (8)..(8): 2'-fluoro-nucleotide
  modified_base (9)..(9): 2'-OMe-nucleotide
  modified_base (10)..(10): 2'-fluoro-nucleotide
  modified_base (11)..(11): 2'-OMe-nucleotide
  modified_base (12)..(12): 2'-fluoro-nucleotide
  modified_base (13)..(13): 2'-OMe-nucleotide
  modified_base (14)..(14): 2'-fluoro-nucleotide
  modified_base (15)..(15): 2'-OMe-nucleotide
  modified_base (16)..(16): 2'-fluoro-nucleotide
  modified_base (17)..(17): 2'-OMe-nucleotide
  modified_base (18)..(18): 2'-fluoro-nucleotide
  modified_base (19)..(19): 2'-OMe-nucleotide
  modified_base (20)..(20): 2'-fluoro-nucleotide
  modified_base (21)..(21): 2'-OMe-nucleotide
  modified_base (22)..(22): 2'-fluoro-nucleotide
  modified_base (23)..(23): Inverted nucleotide
ccagauuccaagccuagaggcut

SEQ ID NO: 697 - DNA, 23 bp, Artificial Sequence
  source: /note="Description of Artificial Sequence: Synthetic oligonucleotide"
  source: /note="Description of Combined DNA/RNA Molecule: Synthetic oligonucleotide"
  modified_base (1)..(1): 2'-OMe-nucleotide
  modified_base (2)..(2): 2'-OMe-nucleotide
  modified_base (3)..(3): 2'-OMe-nucleotide
  modified_base (4)..(4): 2'-fluoro-nucleotide
  modified_base (5)..(5): 2'-OMe-nucleotide
  modified_base (6)..(6): 2'-fluoro-nucleotide
  modified_base (7)..(7): 2'-OMe-nucleotide
  modified_base (8)..(8): 2'-fluoro-nucleotide
  modified_base (9)..(9): 2'-OMe-nucleotide
  modified_base (10)..(10): 2'-fluoro-nucleotide
  modified_base (11)..(11): 2'-OMe-nucleotide
  modified_base (12)..(12): 2'-fluoro-nucleotide
  modified_base (13)..(13): 2'-OMe-nucleotide
  modified_base (14)..(14): 2'-fluoro-nucleotide
  modified_base (15)..(15): 2'-OMe-nucleotide
  modified_base (16)..(16): 2'-fluoro-nucleotide
  modified_base (17)..(17): 2'-OMe-nucleotide
  modified_base (18)..(18): 2'-fluoro-nucleotide
  modified_base (19)..(19): 2'-OMe-nucleotide
  modified_base (20)..(20): 2'-fluoro-nucleotide
  modified_base (21)..(21): 2'-OMe-nucleotide
  modified_base (22)..(22): 2'-fluoro-nucleotide
  modified_base (23)..(23): Inverted nucleotide
ccaaccaacugagcaaaggccut

SEQ ID NO: 698 - DNA, 23 bp, Artificial Sequence
  source: /note="Description of Artificial Sequence: Synthetic oligonucleotide"
  source: /note="Description of Combined DNA/RNA Molecule: Synthetic oligonucleotide"
  modified_base (1)..(1): 2'-OMe-nucleotide
  modified_base (2)..(2): 2'-OMe-nucleotide
  modified_base (3)..(3): 2'-OMe-nucleotide
  modified_base (4)..(4): 2'-fluoro-nucleotide
  modified_base (5)..(5): 2'-OMe-nucleotide
  modified_base (6)..(6): 2'-fluoro-nucleotide
  modified_base (7)..(7): 2'-OMe-nucleotide
  modified_base (8)..(8): 2'-fluoro-nucleotide
  modified_base (9)..(9): 2'-OMe-nucleotide
  modified_base (10)..(10): 2'-fluoro-nucleotide
  modified_base (11)..(11): 2'-OMe-nucleotide
  modified_base (12)..(12): 2'-fluoro-nucleotide
  modified_base (13)..(13): 2'-OMe-nucleotide
  modified_base (14)..(14): 2'-fluoro-nucleotide
  modified_base (15)..(15): 2'-OMe-nucleotide
  modified_base (16)..(16): 2'-fluoro-nucleotide
  modified_base (17)..(17): 2'-OMe-nucleotide
  modified_base (18)..(18): 2'-fluoro-nucleotide
  modified_base (19)..(19): 2'-OMe-nucleotide
  modified_base (20)..(20): 2'-fluoro-nucleotide
  modified_base (21)..(21): 2'-OMe-nucleotide
  modified_base (22)..(22): 2'-fluoro-nucleotide
  modified_base (23)..(23): Inverted nucleotide
ccauaccacggaaauggacagat

SEQ ID NO: 699 - DNA, 23 bp, Artificial Sequence
  source: /note="Description of Artificial Sequence: Synthetic oligonucleotide"
  source: /note="Description of Combined DNA/RNA Molecule: Synthetic oligonucleotide"
  modified_base (1)..(1): 2'-OMe-nucleotide
  modified_base (2)..(2): 2'-OMe-nucleotide
  modified_base (3)..(3): 2'-OMe-nucleotide
  modified_base (4)..(4): 2'-fluoro-nucleotide
  modified_base (5)..(5): 2'-OMe-nucleotide
  modified_base (6)..(6): 2'-fluoro-nucleotide
  modified_base (7)..(7): 2'-OMe-nucleotide
  modified_base (8)..(8): 2'-fluoro-nucleotide
  modified_base (9)..(9): 2'-OMe-nucleotide
  modified_base (10)..(10): 2'-fluoro-nucleotide
  modified_base (11)..(11): 2'-OMe-nucleotide
  modified_base (12)..(12): 2'-fluoro-nucleotide
  modified_base (13)..(13): 2'-OMe-nucleotide
  modified_base (14)..(14): 2'-fluoro-nucleotide
  modified_base (15)..(15): 2'-OMe-nucleotide
  modified_base (16)..(16): 2'-fluoro-nucleotide
  modified_base (17)..(17): 2'-OMe-nucleotide
  modified_base (18)..(18): 2'-fluoro-nucleotide
  modified_base (19)..(19): 2'-OMe-nucleotide
  modified_base (20)..(20): 2'-fluoro-nucleotide
  modified_base (21)..(21): 2'-OMe-nucleotide
  modified_base (22)..(22): 2'-fluoro-nucleotide
  modified_base (23)..(23): Inverted nucleotide
ccaaccacggaaauggacagagt

SEQ ID NO: 700 - DNA, 23 bp, Artificial Sequence
  source: /note="Description of Artificial Sequence: Synthetic oligonucleotide"
  source: /note="Description of Combined DNA/RNA Molecule: Synthetic oligonucleotide"
  modified_base (1)..(1): 2'-OMe-nucleotide
  modified_base (2)..(2): 2'-OMe-nucleotide
  modified_base (3)..(3): 2'-OMe-nucleotide
  modified_base (4)..(4): 2'-fluoro-nucleotide
  modified_base (5)..(5): 2'-OMe-nucleotide
  modified_base (6)..(6): 2'-fluoro-nucleotide
  modified_base (7)..(7): 2'-OMe-nucleotide
  modified_base (8)..(8): 2'-fluoro-nucleotide
  modified_base (9)..(9): 2'-OMe-nucleotide
  modified_base (10)..(10): 2'-fluoro-nucleotide
  modified_base (11)..(11): 2'-OMe-nucleotide
  modified_base (12)..(12): 2'-fluoro-nucleotide
  modified_base (13)..(13): 2'-OMe-nucleotide
  modified_base (14)..(14): 2'-fluoro-nucleotide
  modified_base (15)..(15): 2'-OMe-nucleotide
  modified_base (16)..(16): 2'-fluoro-nucleotide
  modified_base (17)..(17): 2'-OMe-nucleotide
  modified_base (18)..(18): 2'-fluoro-nucleotide
  modified_base (19)..(19): 2'-OMe-nucleotide
  modified_base (20)..(20): 2'-fluoro-nucleotide
  modified_base (21)..(21): 2'-OMe-nucleotide
  modified_base (22)..(22): 2'-fluoro-nucleotide
  modified_base (23)..(23): Inverted nucleotide
ccacacggaaauggacagaguut

SEQ ID NO: 701 - DNA, 23 bp, Artificial Sequence
  source: /note="Description of Artificial Sequence: Synthetic oligonucleotide"
  source: /note="Description of Combined DNA/RNA Molecule: Synthetic oligonucleotide"
  modified_base (1)..(1): 2'-OMe-nucleotide
  modified_base (2)..(2): 2'-OMe-nucleotide
  modified_base (3)..(3): 2'-OMe-nucleotide
  modified_base (4)..(4): 2'-fluoro-nucleotide
  modified_base (5)..(5): 2'-OMe-nucleotide
  modified_base (6)..(6): 2'-fluoro-nucleotide
  modified_base (7)..(7): 2'-OMe-nucleotide
  modified_base (8)..(8): 2'-fluoro-nucleotide
  modified_base (9)..(9): 2'-OMe-nucleotide
  modified_base (10)..(10): 2'-fluoro-nucleotide
  modified_base (11)..(11): 2'-OMe-nucleotide
  modified_base (12)..(12): 2'-fluoro-nucleotide
  modified_base (13)..(13): 2'-OMe-nucleotide
  modified_base (14)..(14): 2'-fluoro-nucleotide
  modified_base (15)..(15): 2'-OMe-nucleotide
  modified_base (16)..(16): 2'-fluoro-nucleotide
  modified_base (17)..(17): 2'-OMe-nucleotide
  modified_base (18)..(18): 2'-fluoro-nucleotide
  modified_base (19)..(19): 2'-OMe-nucleotide
  modified_base (20)..(20): 2'-fluoro-nucleotide
  modified_base (21)..(21): 2'-OMe-nucleotide
  modified_base (22)..(22): 2'-fluoro-nucleotide
  modified_base (23)..(23): Inverted nucleotide
ccaacggaaauggacagaguuat

SEQ ID NO: 702 - DNA, 23 bp, Artificial Sequence
  source: /note="Description of Artificial Sequence: Synthetic oligonucleotide"
  source: /note="Description of Combined DNA/RNA Molecule: Synthetic oligonucleotide"
  modified_base (1)..(1): 2'-OMe-nucleotide
  modified_base (2)..(2): 2'-OMe-nucleotide
  modified_base (3)..(3): 2'-OMe-nucleotide
  modified_base (4)..(4): 2'-fluoro-nucleotide
  modified_base (5)..(5): 2'-OMe-nucleotide
  modified_base (6)..(6): 2'-fluoro-nucleotide
  modified_base (7)..(7): 2'-OMe-nucleotide
  modified_base (8)..(8): 2'-fluoro-nucleotide
  modified_base (9)..(9): 2'-OMe-nucleotide
  modified_base (10)..(10): 2'-fluoro-nucleotide
  modified_base (11)..(11): 2'-OMe-nucleotide
  modified_base (12)..(12): 2'-fluoro-nucleotide
  modified_base (13)..(13): 2'-OMe-nucleotide
  modified_base (14)..(14): 2'-fluoro-nucleotide
  modified_base (15)..(15): 2'-OMe-nucleotide
  modified_base (16)..(16): 2'-fluoro-nucleotide
  modified_base (17)..(17): 2'-OMe-nucleotide
  modified_base (18)..(18): 2'-fluoro-nucleotide
  modified_base (19)..(19): 2'-OMe-nucleotide
  modified_base (20)..(20): 2'-fluoro-nucleotide
  modified_base (21)..(21): 2'-OMe-nucleotide
  modified_base (22)..(22): 2'-fluoro-nucleotide
  modified_base (23)..(23): Inverted nucleotide
ccacggaaauggacagaguuaut

SEQ ID NO: 703 - DNA, 23 bp, Artificial Sequence
  source: /note="Description of Artificial Sequence: Synthetic oligonucleotide"
  source: /note="Description of Combined DNA/RNA Molecule: Synthetic oligonucleotide"
  modified_base (1)..(1): 2'-OMe-nucleotide
  modified_base (2)..(2): 2'-OMe-nucleotide
  modified_base (3)..(3): 2'-OMe-nucleotide
  modified_base (4)..(4): 2'-fluoro-nucleotide
  modified_base (5)..(5): 2'-OMe-nucleotide
  modified_base (6)..(6): 2'-fluoro-nucleotide
  modified_base (7)..(7): 2'-OMe-nucleotide
  modified_base (8)..(8): 2'-fluoro-nucleotide
  modified_base (9)..(9): 2'-OMe-nucleotide
  modified_base (10)..(10): 2'-fluoro-nucleotide
  modified_base (11)..(11): 2'-OMe-nucleotide
  modified_base (12)..(12): 2'-fluoro-nucleotide
  modified_base (13)..(13): 2'-OMe-nucleotide
  modified_base (14)..(14): 2'-fluoro-nucleotide
  modified_base (15)..(15): 2'-OMe-nucleotide
  modified_base (16)..(16): 2'-fluoro-nucleotide
  modified_base (17)..(17): 2'-OMe-nucleotide
  modified_base (18)..(18): 2'-fluoro-nucleotide
  modified_base (19)..(19): 2'-OMe-nucleotide
  modified_base (20)..(20): 2'-fluoro-nucleotide
  modified_base (21)..(21): 2'-OMe-nucleotide
  modified_base (22)..(22): 2'-fluoro-nucleotide
  modified_base (23)..(23): Inverted nucleotide
ccaaauggacagaguuaucaagt

SEQ ID NO: 704 - DNA, 23 bp, Artificial Sequence
  source: /note="Description of Artificial Sequence: Synthetic oligonucleotide"
  source: /note="Description of Combined DNA/RNA Molecule: Synthetic oligonucleotide"
  modified_base (1)..(1): 2'-OMe-nucleotide
  modified_base (2)..(2): 2'-OMe-nucleotide
  modified_base (3)..(3): 2'-OMe-nucleotide
  modified_base (4)..(4): 2'-fluoro-nucleotide
  modified_base (5)..(5): 2'-OMe-nucleotide
  modified_base (6)..(6): 2'-fluoro-nucleotide
  modified_base (7)..(7): 2'-OMe-nucleotide
  modified_base (8)..(8): 2'-fluoro-nucleotide
  modified_base (9)..(9): 2'-OMe-nucleotide
  modified_base (10)..(10): 2'-fluoro-nucleotide
  modified_base (11)..(11): 2'-OMe-nucleotide
  modified_base (12)..(12): 2'-fluoro-nucleotide
  modified_base (13)..(13): 2'-OMe-nucleotide
  modified_base (14)..(14): 2'-fluoro-nucleotide
  modified_base (15)..(15): 2'-OMe-nucleotide
  modified_base (16)..(16): 2'-fluoro-nucleotide
  modified_base (17)..(17): 2'-OMe-nucleotide
  modified_base (18)..(18): 2'-fluoro-nucleotide
  modified_base (19)..(19): 2'-OMe-nucleotide
  modified_base (20)..(20): 2'-fluoro-nucleotide
  modified_base (21)..(21): 2'-OMe-nucleotide
  modified_base (22)..(22): 2'-fluoro-nucleotide
  modified_base (23)..(23): Inverted nucleotide
ccaauggacagaguuaucaaggt

SEQ ID NO: 705 - DNA, 23 bp, Artificial Sequence
  source: /note="Description of Artificial Sequence: Synthetic oligonucleotide"
  source: /note="Description of Combined DNA/RNA Molecule: Synthetic oligonucleotide"
  modified_base (1)..(1): 2'-OMe-nucleotide
  modified_base (2)..(2): 2'-OMe-nucleotide
  modified_base (3)..(3): 2'-OMe-nucleotide
  modified_base (4)..(4): 2'-fluoro-nucleotide
  modified_base (5)..(5): 2'-OMe-nucleotide
  modified_base (6)..(6): 2'-fluoro-nucleotide
  modified_base (7)..(7): 2'-OMe-nucleotide
  modified_base (8)..(8): 2'-fluoro-nucleotide
  modified_base (9)..(9): 2'-OMe-nucleotide
  modified_base (10)..(10): 2'-fluoro-nucleotide
  modified_base (11)..(11): 2'-OMe-nucleotide
  modified_base (12)..(12): 2'-fluoro-nucleotide
  modified_base (13)..(13): 2'-OMe-nucleotide
  modified_base (14)..(14): 2'-fluoro-nucleotide
  modified_base (15)..(15): 2'-OMe-nucleotide
  modified_base (16)..(16): 2'-fluoro-nucleotide
  modified_base (17)..(17): 2'-OMe-nucleotide
  modified_base (18)..(18): 2'-fluoro-nucleotide
  modified_base (19)..(19): 2'-OMe-nucleotide
  modified_base (20)..(20): 2'-fluoro-nucleotide
  modified_base (21)..(21): 2'-OMe-nucleotide
  modified_base (22)..(22): 2'-fluoro-nucleotide
  modified_base (23)..(23): Inverted nucleotide
ccaggacagaguuaucaaggcat

SEQ ID NO: 706 - DNA, 23 bp, Artificial Sequence
  source: /note="Description of Artificial Sequence: Synthetic oligonucleotide"
  source: /note="Description of Combined DNA/RNA Molecule: Synthetic oligonucleotide"
  modified_base (1)..(1): 2'-OMe-nucleotide
  modified_base (2)..(2): 2'-OMe-nucleotide
  modified_base (3)..(3): 2'-OMe-nucleotide
  modified_base (4)..(4): 2'-fluoro-nucleotide
  modified_base (5)..(5): 2'-OMe-nucleotide
  modified_base (6)..(6): 2'-fluoro-nucleotide
  modified_base (7)..(7): 2'-OMe-nucleotide
  modified_base (8)..(8): 2'-fluoro-nucleotide
  modified_base (9)..(9): 2'-OMe-nucleotide
  modified_base (10)..(10): 2'-fluoro-nucleotide
  modified_base (11)..(11): 2'-OMe-nucleotide
  modified_base (12)..(12): 2'-fluoro-nucleotide
  modified_base (13)..(13): 2'-OMe-nucleotide
  modified_base (14)..(14): 2'-fluoro-nucleotide
  modified_base (15)..(15): 2'-OMe-nucleotide
  modified_base (16)..(16): 2'-fluoro-nucleotide
  modified_base (17)..(17): 2'-OMe-nucleotide
  modified_base (18)..(18): 2'-fluoro-nucleotide
  modified_base (19)..(19): 2'-OMe-nucleotide
  modified_base (20)..(20): 2'-fluoro-nucleotide
  modified_base (21)..(21): 2'-OMe-nucleotide
  modified_base (22)..(22): 2'-fluoro-nucleotide
  modified_base (23)..(23): Inverted nucleotide
ccagacagaguuaucaaggcact

SEQ ID NO: 707 - DNA, 23 bp, Artificial Sequence
  source: /note="Description of Artificial Sequence: Synthetic oligonucleotide"
  source: /note="Description of Combined DNA/RNA Molecule: Synthetic oligonucleotide"
  modified_base (1)..(1): 2'-OMe-nucleotide
  modified_base (2)..(2): 2'-OMe-nucleotide
  modified_base (3)..(3): 2'-OMe-nucleotide
  modified_base (4)..(4): 2'-fluoro-nucleotide
  modified_base (5)..(5): 2'-OMe-nucleotide
  modified_base (6)..(6): 2'-fluoro-nucleotide
  modified_base (7)..(7): 2'-OMe-nucleotide
  modified_base (8)..(8): 2'-fluoro-nucleotide
  modified_base (9)..(9): 2'-OMe-nucleotide
  modified_base (10)..(10): 2'-fluoro-nucleotide
  modified_base (11)..(11): 2'-OMe-nucleotide
  modified_base (12)..(12): 2'-fluoro-nucleotide
  modified_base (13)..(13): 2'-OMe-nucleotide
  modified_base (14)..(14): 2'-fluoro-nucleotide
  modified_base (15)..(15): 2'-OMe-nucleotide
  modified_base (16)..(16): 2'-fluoro-nucleotide
  modified_base (17)..(17): 2'-OMe-nucleotide
  modified_base (18)..(18): 2'-fluoro-nucleotide
  modified_base (19)..(19): 2'-OMe-nucleotide
  modified_base (20)..(20): 2'-fluoro-nucleotide
  modified_base (21)..(21): 2'-OMe-nucleotide
  modified_base (22)..(22): 2'-fluoro-nucleotide
  modified_base (23)..(23): Inverted nucleotide
ccaacagaguuaucaaggcacat

SEQ ID NO: 708 - DNA, 23 bp, Artificial Sequence
  source: /note="Description of Artificial Sequence: Synthetic oligonucleotide"
  source: /note="Description of Combined DNA/RNA Molecule: Synthetic oligonucleotide"
  modified_base (1)..(1): 2'-OMe-nucleotide
  modified_base (2)..(2): 2'-OMe-nucleotide
  modified_base (3)..(3): 2'-OMe-nucleotide
  modified_base (4)..(4): 2'-fluoro-nucleotide
  modified_base (5)..(5): 2'-OMe-nucleotide
  modified_base (6)..(6): 2'-fluoro-nucleotide
  modified_base (7)..(7): 2'-OMe-nucleotide
  modified_base (8)..(8): 2'-fluoro-nucleotide
  modified_base (9)..(9): 2'-OMe-nucleotide
  modified_base (10)..(10): 2'-fluoro-nucleotide
  modified_base (11)..(11): 2'-OMe-nucleotide
  modified_base (12)..(12): 2'-fluoro-nucleotide
  modified_base (13)..(13): 2'-OMe-nucleotide
  modified_base (14)..(14): 2'-fluoro-nucleotide
  modified_base (15)..(15): 2'-OMe-nucleotide
  modified_base (16)..(16): 2'-fluoro-nucleotide
  modified_base (17)..(17): 2'-OMe-nucleotide
  modified_base (18)..(18): 2'-fluoro-nucleotide
  modified_base (19)..(19): 2'-OMe-nucleotide
  modified_base (20)..(20): 2'-fluoro-nucleotide
  modified_base (21)..(21): 2'-OMe-nucleotide
  modified_base (22)..(22): 2'-fluoro-nucleotide
  modified_base (23)..(23): Inverted nucleotide
ccagaguuaucaaggcacauact

SEQ ID NO: 709 - DNA, 23 bp, Artificial Sequence
  source: /note="Description of Artificial Sequence: Synthetic oligonucleotide"
  source: /note="Description of Combined DNA/RNA Molecule: Synthetic oligonucleotide"
  modified_base (1)..(1): 2'-OMe-nucleotide
  modified_base (2)..(2): 2'-OMe-nucleotide
  modified_base (3)..(3): 2'-OMe-nucleotide
  modified_base (4)..(4): 2'-fluoro-nucleotide
  modified_base (5)..(5): 2'-OMe-nucleotide
  modified_base (6)..(6): 2'-fluoro-nucleotide
  modified_base (7)..(7): 2'-OMe-nucleotide
  modified_base (8)..(8): 2'-fluoro-nucleotide
  modified_base (9)..(9): 2'-OMe-nucleotide
  modified_base (10)..(10): 2'-fluoro-nucleotide
  modified_base (11)..(11): 2'-OMe-nucleotide
  modified_base (12)..(12): 2'-fluoro-nucleotide
  modified_base (13)..(13): 2'-OMe-nucleotide
  modified_base (14)..(14): 2'-fluoro-nucleotide
  modified_base (15)..(15): 2'-OMe-nucleotide
  modified_base (16)..(16): 2'-fluoro-nucleotide
  modified_base (17)..(17): 2'-OMe-nucleotide
  modified_base (18)..(18): 2'-fluoro-nucleotide
  modified_base (19)..(19): 2'-OMe-nucleotide
  modified_base (20)..(20): 2'-fluoro-nucleotide
  modified_base (21)..(21): 2'-OMe-nucleotide
  modified_base (22)..(22): 2'-fluoro-nucleotide
  modified_base (23)..(23): Inverted nucleotide
ccaaguuaucaaggcacauacut

SEQ ID NO: 710 - DNA, 23 bp, Artificial Sequence
  source: /note="Description of Artificial Sequence: Synthetic oligonucleotide"
  source: /note="Description of Combined DNA/RNA Molecule: Synthetic oligonucleotide"
  modified_base (1)..(1): 2'-OMe-nucleotide
  modified_base (2)..(2): 2'-OMe-nucleotide
  modified_base (3)..(3): 2'-OMe-nucleotide
  modified_base (4)..(4): 2'-fluoro-nucleotide
  modified_base (5)..(5): 2'-OMe-nucleotide
  modified_base (6)..(6): 2'-fluoro-nucleotide
  modified_base (7)..(7): 2'-OMe-nucleotide
  modified_base (8)..(8): 2'-fluoro-nucleotide
  modified_base (9)..(9): 2'-OMe-nucleotide
  modified_base (10)..(10): 2'-fluoro-nucleotide
  modified_base (11)..(11): 2'-OMe-nucleotide
  modified_base (12)..(12): 2'-fluoro-nucleotide
  modified_base (13)..(13): 2'-OMe-nucleotide
  modified_base (14)..(14): 2'-fluoro-nucleotide
  modified_base (15)..(15): 2'-OMe-nucleotide
  modified_base (16)..(16): 2'-fluoro-nucleotide
  modified_base (17)..(17): 2'-OMe-nucleotide
  modified_base (18)..(18): 2'-fluoro-nucleotide
  modified_base (19)..(19): 2'-OMe-nucleotide
  modified_base (20)..(20): 2'-fluoro-nucleotide
  modified_base (21)..(21): 2'-OMe-nucleotide
  modified_base (22)..(22): 2'-fluoro-nucleotide
  modified_base (23)..(23): Inverted nucleotide
ccaguuaucaaggcacauacuut

SEQ ID NO: 711 - DNA, 23 bp, Artificial Sequence
  source: /note="Description of Artificial Sequence: Synthetic oligonucleotide"
  source: /note="Description of Combined DNA/RNA Molecule: Synthetic oligonucleotide"
  modified_base (1)..(1): 2'-OMe-nucleotide
  modified_base (2)..(2): 2'-OMe-nucleotide
  modified_base (3)..(3): 2'-OMe-nucleotide
  modified_base (4)..(4): 2'-fluoro-nucleotide
  modified_base (5)..(5): 2'-OMe-nucleotide
  modified_base (6)..(6): 2'-fluoro-nucleotide
  modified_base (7)..(7): 2'-OMe-nucleotide
  modified_base (8)..(8): 2'-fluoro-nucleotide
  modified_base (9)..(9): 2'-OMe-nucleotide
  modified_base (10)..(10): 2'-fluoro-nucleotide
  modified_base (11)..(11): 2'-OMe-nucleotide
  modified_base (12)..(12): 2'-fluoro-nucleotide
  modified_base (13)..(13): 2'-OMe-nucleotide
  modified_base (14)..(14): 2'-fluoro-nucleotide
  modified_base (15)..(15): 2'-OMe-nucleotide
  modified_base (16)..(16): 2'-fluoro-nucleotide
  modified_base (17)..(17): 2'-OMe-nucleotide
  modified_base (18)..(18): 2'-fluoro-nucleotide
  modified_base (19)..(19): 2'-OMe-nucleotide
  modified_base (20)..(20): 2'-fluoro-nucleotide
  modified_base (21)..(21): 2'-OMe-nucleotide
  modified_base (22)..(22): 2'-fluoro-nucleotide
  modified_base (23)..(23): Inverted nucleotide
ccaaaaugcuggcuugaucaagt

SEQ ID NO: 712 - DNA, 23 bp, Artificial Sequence
  source: /note="Description of Artificial Sequence: Synthetic oligonucleotide"
  source: /note="Description of Combined DNA/RNA Molecule: Synthetic oligonucleotide"
  modified_base (1)..(1): 2'-OMe-nucleotide
  modified_base (2)..(2): 2'-OMe-nucleotide
  modified_base (3)..(3): 2'-OMe-nucleotide
  modified_base (4)..(4): 2'-fluoro-nucleotide
  modified_base (5)..(5): 2'-OMe-nucleotide
  modified_base (6)..(6): 2'-fluoro-nucleotide
  modified_base (7)..(7): 2'-OMe-nucleotide
  modified_base (8)..(8): 2'-fluoro-nucleotide
  modified_base (9)..(9): 2'-OMe-nucleotide
  modified_base (10)..(10): 2'-fluoro-nucleotide
  modified_base (11)..(11): 2'-OMe-nucleotide
  modified_base (12)..(12): 2'-fluoro-nucleotide
  modified_base (13)..(13): 2'-OMe-nucleotide
  modified_base (14)..(14): 2'-fluoro-nucleotide
  modified_base (15)..(15): 2'-OMe-nucleotide
  modified_base (16)..(16): 2'-fluoro-nucleotide
  modified_base (17)..(17): 2'-OMe-nucleotide
  modified_base (18)..(18): 2'-fluoro-nucleotide
  modified_base (19)..(19): 2'-OMe-nucleotide
  modified_base (20)..(20): 2'-fluoro-nucleotide
  modified_base (21)..(21): 2'-OMe-nucleotide
  modified_base (22)..(22): 2'-fluoro-nucleotide
  modified_base (23)..(23): Inverted nucleotide
ccagcuugaucaagaacuacugt

SEQ ID NO: 713 - DNA, 23 bp, Artificial Sequence
  source: /note="Description of Artificial Sequence: Synthetic oligonucleotide"
  source: /note="Description of Combined DNA/RNA Molecule: Synthetic oligonucleotide"
  modified_base (1)..(1): 2'-OMe-nucleotide
  modified_base (2)..(2): 2'-OMe-nucleotide
  modified_base (3)..(3): 2'-OMe-nucleotide
  modified_base (4)..(4): 2'-fluoro-nucleotide
  modified_base (5)..(5): 2'-OMe-nucleotide
  modified_base (6)..(6): 2'-fluoro-nucleotide
  modified_base (7)..(7): 2'-OMe-nucleotide
  modified_base (8)..(8): 2'-fluoro-nucleotide
  modified_base (9)..(9): 2'-OMe-nucleotide
  modified_base (10)..(10): 2'-fluoro-nucleotide
  modified_base (11)..(11): 2'-OMe-nucleotide
  modified_base (12)..(12): 2'-fluoro-nucleotide
  modified_base (13)..(13): 2'-OMe-nucleotide
  modified_base (14)..(14): 2'-fluoro-nucleotide
  modified_base (15)..(15): 2'-OMe-nucleotide
  modified_base (16)..(16): 2'-fluoro-nucleotide
  modified_base (17)..(17): 2'-OMe-nucleotide
  modified_base (18)..(18): 2'-fluoro-nucleotide
  modified_base (19)..(19): 2'-OMe-nucleotide
  modified_base (20)..(20): 2'-fluoro-nucleotide
  modified_base (21)..(21): 2'-OMe-nucleotide
  modified_base (22)..(22): 2'-fluoro-nucleotide
  modified_base (23)..(23): Inverted nucleotide
ccagccccuugguguuauacaat

SEQ ID NO: 714 - DNA, 23 bp, Artificial Sequence
  source: /note="Description of Artificial Sequence: Synthetic oligonucleotide"
  source: /note="Description of Combined DNA/RNA Molecule: Synthetic oligonucleotide"
  modified_base (1)..(1): 2'-OMe-nucleotide
  modified_base (2)..(2): 2'-OMe-nucleotide
  modified_base (3)..(3): 2'-OMe-nucleotide
  modified_base (4)..(4): 2'-fluoro-nucleotide
  modified_base (5)..(5): 2'-OMe-nucleotide
  modified_base (6)..(6): 2'-fluoro-nucleotide
  modified_base (7)..(7): 2'-OMe-nucleotide
  modified_base (8)..(8): 2'-fluoro-nucleotide
  modified_base (9)..(9): 2'-OMe-nucleotide
  modified_base (10)..(10): 2'-fluoro-nucleotide
  modified_base (11)..(11): 2'-OMe-nucleotide
  modified_base (12)..(12): 2'-fluoro-nucleotide
  modified_base (13)..(13): 2'-OMe-nucleotide
  modified_base (14)..(14): 2'-fluoro-nucleotide
  modified_base (15)..(15): 2'-OMe-nucleotide
  modified_base (16)..(16): 2'-fluoro-nucleotide
  modified_base (17)..(17): 2'-OMe-nucleotide
  modified_base (18)..(18): 2'-fluoro-nucleotide
  modified_base (19)..(19): 2'-OMe-nucleotide
  modified_base (20)..(20): 2'-fluoro-nucleotide
  modified_base (21)..(21): 2'-OMe-nucleotide
  modified_base (22)..(22): 2'-fluoro-nucleotide
  modified_base (23)..(23): Inverted nucleotide
ccacccuugguguuauacaacat

SEQ ID NO: 715 - DNA, 23 bp, Artificial Sequence
  source: /note="Description of Artificial Sequence: Synthetic oligonucleotide"
  source: /note="Description of Combined DNA/RNA Molecule: Synthetic oligonucleotide"
  modified_base (1)..(1): 2'-OMe-nucleotide
  modified_base (2)..(2): 2'-OMe-nucleotide
  modified_base (3)..(3): 2'-OMe-nucleotide
  modified_base (4)..(4): 2'-fluoro-nucleotide
  modified_base (5)..(5): 2'-OMe-nucleotide
  modified_base (6)..(6): 2'-fluoro-nucleotide
  modified_base (7)..(7): 2'-OMe-nucleotide
  modified_base (8)..(8): 2'-fluoro-nucleotide
  modified_base (9)..(9): 2'-OMe-nucleotide
  modified_base (10)..(10): 2'-fluoro-nucleotide
  modified_base (11)..(11): 2'-OMe-nucleotide
  modified_base (12)..(12): 2'-fluoro-nucleotide
  modified_base (13)..(13): 2'-OMe-nucleotide
  modified_base (14)..(14): 2'-fluoro-nucleotide
  modified_base (15)..(15): 2'-OMe-nucleotide
  modified_base (16)..(16): 2'-fluoro-nucleotide
  modified_base (17)..(17): 2'-OMe-nucleotide
  modified_base (18)..(18): 2'-fluoro-nucleotide
  modified_base (19)..(19): 2'-OMe-nucleotide
  modified_base (20)..(20): 2'-fluoro-nucleotide
  modified_base (21)..(21): 2'-OMe-nucleotide
  modified_base (22)..(22): 2'-fluoro-nucleotide
  modified_base (23)..(23): Inverted nucleotide
ccauugguguuauacaacagaut

SEQ ID NO: 716 - DNA, 23 bp, Artificial Sequence
  source: /note="Description of Artificial Sequence: Synthetic oligonucleotide"
  source: /note="Description of Combined DNA/RNA Molecule: Synthetic oligonucleotide"
  modified_base (1)..(1): 2'-OMe-nucleotide
  modified_base (2)..(2): 2'-OMe-nucleotide
  modified_base (3)..(3): 2'-OMe-nucleotide
  modified_base (4)..(4): 2'-fluoro-nucleotide
  modified_base (5)..(5): 2'-OMe-nucleotide
  modified_base (6)..(6): 2'-fluoro-nucleotide
  modified_base (7)..(7): 2'-OMe-nucleotide
  modified_base (8)..(8): 2'-fluoro-nucleotide
  modified_base (9)..(9): 2'-OMe-nucleotide
  modified_base (10)..(10): 2'-fluoro-nucleotide
  modified_base (11)..(11): 2'-OMe-nucleotide
  modified_base (12)..(12): 2'-fluoro-nucleotide
  modified_base (13)..(13): 2'-OMe-nucleotide
  modified_base (14)..(14): 2'-fluoro-nucleotide
  modified_base (15)..(15): 2'-OMe-nucleotide
  modified_base (16)..(16): 2'-fluoro-nucleotide
  modified_base (17)..(17): 2'-OMe-nucleotide
  modified_base (18)..(18): 2'-fluoro-nucleotide
  modified_base (19)..(19): 2'-OMe-nucleotide
  modified_base (20)..(20): 2'-fluoro-nucleotide
  modified_base (21)..(21): 2'-OMe-nucleotide
  modified_base (22)..(22): 2'-fluoro-nucleotide
  modified_base (23)..(23): Inverted nucleotide
ccaguguuauacaacagauccct

SEQ ID NO: 717 - DNA, 23 bp, Artificial Sequence
  source: /note="Description of Artificial Sequence: Synthetic oligonucleotide"
  source: /note="Description of Combined DNA/RNA Molecule: Synthetic oligonucleotide"
  modified_base (1)..(1): 2'-OMe-nucleotide
  modified_base (2)..(2): 2'-OMe-nucleotide
  modified_base (3)..(3): 2'-OMe-nucleotide
  modified_base (4)..(4): 2'-fluoro-nucleotide
  modified_base (5)..(5): 2'-OMe-nucleotide
  modified_base (6)..(6): 2'-fluoro-nucleotide
  modified_base (7)..(7): 2'-OMe-nucleotide
  modified_base (8)..(8): 2'-fluoro-nucleotide
  modified_base (9)..(9): 2'-OMe-nucleotide
  modified_base (10)..(10): 2'-fluoro-nucleotide
  modified_base (11)..(11): 2'-OMe-nucleotide
  modified_base (12)..(12): 2'-fluoro-nucleotide
  modified_base (13)..(13): 2'-OMe-nucleotide
  modified_base (14)..(14): 2'-fluoro-nucleotide
  modified_base (15)..(15): 2'-OMe-nucleotide
  modified_base (16)..(16): 2'-fluoro-nucleotide
  modified_base (17)..(17): 2'-OMe-nucleotide
  modified_base (18)..(18): 2'-fluoro-nucleotide
  modified_base (19)..(19): 2'-OMe-nucleotide
  modified_base (20)..(20): 2'-fluoro-nucleotide
  modified_base (21)..(21): 2'-OMe-nucleotide
  modified_base (22)..(22): 2'-fluoro-nucleotide
  modified_base (23)..(23): Inverted nucleotide
ccauauacaacagaucccagugt

SEQ ID NO: 718 - DNA, 23 bp, Artificial Sequence
  source: /note="Description of Artificial Sequence: Synthetic oligonucleotide"
  source: /note="Description of Combined DNA/RNA Molecule: Synthetic oligonucleotide"
  modified_base (1)..(1): 2'-OMe-nucleotide
  modified_base (2)..(2): 2'-OMe-nucleotide
  modified_base (3)..(3): 2'-OMe-nucleotide
  modified_base (4)..(4): 2'-fluoro-nucleotide
  modified_base (5)..(5): 2'-OMe-nucleotide
  modified_base (6)..(6): 2'-fluoro-nucleotide
  modified_base (7)..(7): 2'-OMe-nucleotide
  modified_base (8)..(8): 2'-fluoro-nucleotide
  modified_base (9)..(9): 2'-OMe-nucleotide
  modified_base (10)..(10): 2'-fluoro-nucleotide
  modified_base (11)..(11): 2'-OMe-nucleotide
  modified_base (12)..(12): 2'-fluoro-nucleotide
  modified_base (13)..(13): 2'-OMe-nucleotide
  modified_base (14)..(14): 2'-fluoro-nucleotide
  modified_base (15)..(15): 2'-OMe-nucleotide
  modified_base (16)..(16): 2'-fluoro-nucleotide
  modified_base (17)..(17): 2'-OMe-nucleotide
  modified_base (18)..(18): 2'-fluoro-nucleotide
  modified_base (19)..(19): 2'-OMe-nucleotide
  modified_base (20)..(20): 2'-fluoro-nucleotide
  modified_base (21)..(21): 2'-OMe-nucleotide
  modified_base (22)..(22): 2'-fluoro-nucleotide
  modified_base (23)..(23): Inverted nucleotide
ccaugcaaccugacacaaugcct

SEQ ID NO: 719 - DNA, 23 bp, Artificial Sequence
  source: /note="Description of Artificial Sequence: Synthetic oligonucleotide"
  source: /note="Description of Combined DNA/RNA Molecule: Synthetic oligonucleotide"
  modified_base (1)..(1): 2'-OMe-nucleotide
  modified_base (2)..(2): 2'-OMe-nucleotide
  modified_base (3)..(3): 2'-OMe-nucleotide
  modified_base (4)..(4): 2'-fluoro-nucleotide
  modified_base (5)..(5): 2'-OMe-nucleotide
  modified_base (6)..(6): 2'-fluoro-nucleotide
  modified_base (7)..(7): 2'-OMe-nucleotide
  modified_base (8)..(8): 2'-fluoro-nucleotide
  modified_base (9)..(9): 2'-OMe-nucleotide
  modified_base (10)..(10): 2'-fluoro-nucleotide
  modified_base (11)..(11): 2'-OMe-nucleotide
  modified_base (12)..(12): 2'-fluoro-nucleotide
  modified_base (13)..(13): 2'-OMe-nucleotide
  modified_base (14)..(14): 2'-fluoro-nucleotide
  modified_base (15)..(15): 2'-OMe-nucleotide
  modified_base (16)..(16): 2'-fluoro-nucleotide
  modified_base (17)..(17): 2'-OMe-nucleotide
  modified_base (18)..(18): 2'-fluoro-nucleotide
  modified_base (19)..(19): 2'-OMe-nucleotide
  modified_base (20)..(20): 2'-fluoro-nucleotide
  modified_base (21)..(21): 2'-OMe-nucleotide
  modified_base (22)..(22): 2'-fluoro-nucleotide
  modified_base (23)..(23): Inverted nucleotide
ccagcaaccugacacaaugccut

SEQ ID NO: 720 - DNA, 23 bp, Artificial Sequence
  source: /note="Description of Artificial Sequence: Synthetic oligonucleotide"
  source: /note="Description of Combined DNA/RNA Molecule: Synthetic oligonucleotide"
  modified_base (1)..(1): 2'-OMe-nucleotide
  modified_base (2)..(2): 2'-OMe-nucleotide
  modified_base (3)..(3): 2'-OMe-nucleotide
  modified_base (4)..(4): 2'-fluoro-nucleotide
  modified_base (5)..(5): 2'-OMe-nucleotide
  modified_base (6)..(6): 2'-fluoro-nucleotide
  modified_base (7)..(7): 2'-OMe-nucleotide
  modified_base (8)..(8): 2'-fluoro-nucleotide
  modified_base (9)..(9): 2'-OMe-nucleotide
  modified_base (10)..(10): 2'-fluoro-nucleotide
  modified_base (11)..(11): 2'-OMe-nucleotide
  modified_base (12)..(12): 2'-fluoro-nucleotide
  modified_base (13)..(13): 2'-OMe-nucleotide
  modified_base (14)..(14): 2'-fluoro-nucleotide
  modified_base (15)..(15): 2'-OMe-nucleotide
  modified_base (16)..(16): 2'-fluoro-nucleotide
  modified_base (17)..(17): 2'-OMe-nucleotide
  modified_base (18)..(18): 2'-fluoro-nucleotide
  modified_base (19)..(19): 2'-OMe-nucleotide
  modified_base (20)..(20): 2'-fluoro-nucleotide
  modified_base (21)..(21): 2'-OMe-nucleotide
  modified_base (22)..(22): 2'-fluoro-nucleotide
  modified_base (23)..(23): Inverted nucleotide
ccaaacucucacgguggucccat

SEQ ID NO: 721 - DNA, 23 bp, Artificial Sequence
  source: /note="Description of Artificial Sequence: Synthetic oligonucleotide"
  source: /note="Description of Combined DNA/RNA Molecule: Synthetic oligonucleotide"
  modified_base (1)..(1): 2'-OMe-nucleotide
  modified_base (2)..(2): 2'-OMe-nucleotide
  modified_base (3)..(3): 2'-OMe-nucleotide
  modified_base (4)..(4): 2'-fluoro-nucleotide
  modified_base (5)..(5): 2'-OMe-nucleotide
  modified_base (6)..(6): 2'-fluoro-nucleotide
  modified_base (7)..(7): 2'-OMe-nucleotide
  modified_base (8)..(8): 2'-fluoro-nucleotide
  modified_base (9)..(9): 2'-OMe-nucleotide
  modified_base (10)..(10): 2'-fluoro-nucleotide
  modified_base (11)..(11): 2'-OMe-nucleotide
  modified_base (12)..(12): 2'-fluoro-nucleotide
  modified_base (13)..(13): 2'-OMe-nucleotide
  modified_base (14)..(14): 2'-fluoro-nucleotide
  modified_base (15)..(15): 2'-OMe-nucleotide
  modified_base (16)..(16): 2'-fluoro-nucleotide
  modified_base (17)..(17): 2'-OMe-nucleotide
  modified_base (18)..(18): 2'-fluoro-nucleotide
  modified_base (19)..(19): 2'-OMe-nucleotide
  modified_base (20)..(20): 2'-fluoro-nucleotide
  modified_base (21)..(21): 2'-OMe-nucleotide
  modified_base (22)..(22): 2'-fluoro-nucleotide
  modified_base (23)..(23): Inverted nucleotide
ccaucucacgguggucccagaut

SEQ ID NO: 722 - DNA, 23 bp, Artificial Sequence
  source: /note="Description of Artificial Sequence: Synthetic oligonucleotide"
  source: /note="Description of Combined DNA/RNA Molecule: Synthetic oligonucleotide"
  modified_base (1)..(1): 2'-OMe-nucleotide
  modified_base (2)..(2): 2'-OMe-nucleotide
  modified_base (3)..(3): 2'-OMe-nucleotide
  modified_base (4)..(4): 2'-fluoro-nucleotide
  modified_base (5)..(5): 2'-OMe-nucleotide
  modified_base (6)..(6): 2'-fluoro-nucleotide
  modified_base (7)..(7): 2'-OMe-nucleotide
  modified_base (8)..(8): 2'-fluoro-nucleotide
  modified_base (9)..(9): 2'-OMe-nucleotide
  modified_base (10)..(10): 2'-fluoro-nucleotide
  modified_base (11)..(11): 2'-OMe-nucleotide
  modified_base (12)..(12): 2'-fluoro-nucleotide
  modified_base (13)..(13): 2'-OMe-nucleotide
  modified_base (14)..(14): 2'-fluoro-nucleotide
  modified_base (15)..(15): 2'-OMe-nucleotide
  modified_base (16)..(16): 2'-fluoro-nucleotide
  modified_base (17)..(17): 2'-OMe-nucleotide
  modified_base (18)..(18): 2'-fluoro-nucleotide
  modified_base (19)..(19): 2'-OMe-nucleotide
  modified_base (20)..(20): 2'-fluoro-nucleotide
  modified_base (21)..(21): 2'-OMe-nucleotide
  modified_base (22)..(22): 2'-fluoro-nucleotide
  modified_base (23)..(23): Inverted nucleotide
ccaacgguggucccagauccaat

SEQ ID NO: 723 - DNA, 23 bp, Artificial Sequence
  source: /note="Description of Artificial Sequence: Synthetic oligonucleotide"
  source: /note="Description of Combined DNA/RNA Molecule: Synthetic oligonucleotide"
  modified_base (1)..(1): 2'-OMe-nucleotide
  modified_base (2)..(2): 2'-OMe-nucleotide
  modified_base (3)..(3): 2'-OMe-nucleotide
  modified_base (4)..(4): 2'-fluoro-nucleotide
  modified_base (5)..(5): 2'-OMe-nucleotide
  modified_base (6)..(6): 2'-fluoro-nucleotide
  modified_base (7)..(7): 2'-OMe-nucleotide
  modified_base (8)..(8): 2'-fluoro-nucleotide
  modified_base (9)..(9): 2'-OMe-nucleotide
  modified_base (10)..(10): 2'-fluoro-nucleotide
  modified_base (11)..(11): 2'-OMe-nucleotide
  modified_base (12)..(12): 2'-fluoro-nucleotide
  modified_base (13)..(13): 2'-OMe-nucleotide
  modified_base (14)..(14): 2'-fluoro-nucleotide
  modified_base (15)..(15): 2'-OMe-nucleotide
  modified_base (16)..(16): 2'-fluoro-nucleotide
  modified_base (17)..(17): 2'-OMe-nucleotide
  modified_base (18)..(18): 2'-fluoro-nucleotide
  modified_base (19)..(19): 2'-OMe-nucleotide
  modified_base (20)..(20): 2'-fluoro-nucleotide
  modified_base (21)..(21): 2'-OMe-nucleotide
  modified_base (22)..(22): 2'-fluoro-nucleotide
  modified_base (23)..(23): Inverted nucleotide
ccauggucccagauccaagcact

SEQ ID NO: 724 - DNA, 23 bp, Artificial Sequence
  source: /note="Description of Artificial Sequence: Synthetic oligonucleotide"
  source: /note="Description of Combined DNA/RNA Molecule: Synthetic oligonucleotide"
  modified_base (1)..(1): 2'-OMe-nucleotide
  modified_base (2)..(2): 2'-OMe-nucleotide
  modified_base (3)..(3): 2'-OMe-nucleotide
  modified_base (4)..(4): 2'-fluoro-nucleotide
  modified_base (5)..(5): 2'-OMe-nucleotide
  modified_base (6)..(6): 2'-fluoro-nucleotide
  modified_base (7)..(7): 2'-OMe-nucleotide
  modified_base (8)..(8): 2'-fluoro-nucleotide
  modified_base (9)..(9): 2'-OMe-nucleotide
  modified_base (10)..(10): 2'-fluoro-nucleotide
  modified_base (11)..(11): 2'-OMe-nucleotide
  modified_base (12)..(12): 2'-fluoro-nucleotide
  modified_base (13)..(13): 2'-OMe-nucleotide
  modified_base (14)..(14): 2'-fluoro-nucleotide
  modified_base (15)..(15): 2'-OMe-nucleotide
  modified_base (16)..(16): 2'-fluoro-nucleotide
  modified_base (17)..(17): 2'-OMe-nucleotide
  modified_base (18)..(18): 2'-fluoro-nucleotide
  modified_base (19)..(19): 2'-OMe-nucleotide
  modified_base (20)..(20): 2'-fluoro-nucleotide
  modified_base (21)..(21): 2'-OMe-nucleotide
  modified_base (22)..(22): 2'-fluoro-nucleotide
  modified_base (23)..(23): Inverted nucleotide
ccaucccagauccaagcacagat

SEQ ID NO: 725 - DNA, 23 bp, Artificial Sequence
  source: /note="Description of Artificial Sequence: Synthetic oligonucleotide"
  source: /note="Description of Combined DNA/RNA Molecule: Synthetic oligonucleotide"
  modified_base (1)..(1): 2'-OMe-nucleotide
  modified_base (2)..(2): 2'-OMe-nucleotide
  modified_base (3)..(3): 2'-OMe-nucleotide
  modified_base (4)..(4): 2'-fluoro-nucleotide
  modified_base (5)..(5): 2'-OMe-nucleotide
  modified_base (6)..(6): 2'-fluoro-nucleotide
  modified_base (7)..(7): 2'-OMe-nucleotide
  modified_base (8)..(8): 2'-fluoro-nucleotide
  modified_base (9)..(9): 2'-OMe-nucleotide
  modified_base (10)..(10): 2'-fluoro-nucleotide
  modified_base (11)..(11): 2'-OMe-nucleotide
  modified_base (12)..(12): 2'-fluoro-nucleotide
  modified_base (13)..(13): 2'-OMe-nucleotide
  modified_base (14)..(14): 2'-fluoro-nucleotide
  modified_base (15)..(15): 2'-OMe-nucleotide
  modified_base (16)..(16): 2'-fluoro-nucleotide
  modified_base (17)..(17): 2'-OMe-nucleotide
  modified_base (18)..(18): 2'-fluoro-nucleotide
  modified_base (19)..(19): 2'-OMe-nucleotide
  modified_base (20)..(20): 2'-fluoro-nucleotide
  modified_base (21)..(21): 2'-OMe-nucleotide
  modified_base (22)..(22): 2'-fluoro-nucleotide
  modified_base (23)..(23): Inverted nucleotide
ccaagauccaagcacagaggcut

SEQ ID NO: 726 - DNA, 23 bp, Artificial Sequence
  source: /note="Description of Artificial Sequence: Synthetic oligonucleotide"
  source: /note="Description of Combined DNA/RNA Molecule: Synthetic oligonucleotide"
  modified_base (1)..(1): 2'-OMe-nucleotide
  modified_base (2)..(2): 2'-OMe-nucleotide
  modified_base (3)..(3): 2'-OMe-nucleotide
  modified_base (4)..(4): 2'-fluoro-nucleotide
  modified_base (5)..(5): 2'-OMe-nucleotide
  modified_base (6)..(6): 2'-fluoro-nucleotide
  modified_base (7)..(7): 2'-OMe-nucleotide
  modified_base (8)..(8): 2'-fluoro-nucleotide
  modified_base (9)..(9): 2'-OMe-nucleotide
  modified_base (10)..(10): 2'-fluoro-nucleotide
  modified_base (11)..(11): 2'-OMe-nucleotide
  modified_base (12)..(12): 2'-fluoro-nucleotide
  modified_base (13)..(13): 2'-OMe-nucleotide
  modified_base (14)..(14): 2'-fluoro-nucleotide
  modified_base (15)..(15): 2'-OMe-nucleotide
  modified_base (16)..(16): 2'-fluoro-nucleotide
  modified_base (17)..(17): 2'-OMe-nucleotide
  modified_base (18)..(18): 2'-fluoro-nucleotide
  modified_base (19)..(19): 2'-OMe-nucleotide
  modified_base (20)..(20): 2'-fluoro-nucleotide
  modified_base (21)..(21): 2'-OMe-nucleotide
  modified_base (22)..(22): 2'-fluoro-nucleotide
  modified_base (23)..(23): Inverted nucleotide
ccagauccaagcacagaggcuut

SEQ ID NO: 727 - DNA, 23 bp, Artificial Sequence
  source: /note="Description of Artificial Sequence: Synthetic oligonucleotide"
  source: /note="Description of Combined DNA/RNA Molecule: Synthetic oligonucleotide"
  modified_base (1)..(1): 2'-OMe-nucleotide
  modified_base (2)..(2): 2'-OMe-nucleotide
  modified_base (3)..(3): 2'-OMe-nucleotide
  modified_base (4)..(4): 2'-fluoro-nucleotide
  modified_base (5)..(5): 2'-OMe-nucleotide
  modified_base (6)..(6): 2'-fluoro-nucleotide
  modified_base (7)..(7): 2'-OMe-nucleotide
  modified_base (8)..(8): 2'-fluoro-nucleotide
  modified_base (9)..(9): 2'-OMe-nucleotide
  modified_base (10)..(10): 2'-fluoro-nucleotide
  modified_base (11)..(11): 2'-OMe-nucleotide
  modified_base (12)..(12): 2'-fluoro-nucleotide
  modified_base (13)..(13): 2'-OMe-nucleotide
  modified_base (14)..(14): 2'-fluoro-nucleotide
  modified_base (15)..(15): 2'-OMe-nucleotide
  modified_base (16)..(16): 2'-fluoro-nucleotide
  modified_base (17)..(17): 2'-OMe-nucleotide
  modified_base (18)..(18): 2'-fluoro-nucleotide
  modified_base (19)..(19): 2'-OMe-nucleotide
  modified_base (20)..(20): 2'-fluoro-nucleotide
  modified_base (21)..(21): 2'-OMe-nucleotide
  modified_base (22)..(22): 2'-fluoro-nucleotide
  modified_base (23)..(23): Inverted nucleotide
ccaauccaagcacagaggcuuct

SEQ ID NO: 728 - DNA, 23 bp, Artificial Sequence
  source: /note="Description of Artificial Sequence: Synthetic oligonucleotide"
  source: /note="Description of Combined DNA/RNA Molecule: Synthetic oligonucleotide"
  modified_base (1)..(1): 2'-OMe-nucleotide
  modified_base (2)..(2): 2'-OMe-nucleotide
  modified_base (3)..(3): 2'-OMe-nucleotide
  modified_base (4)..(4): 2'-fluoro-nucleotide
  modified_base (5)..(5): 2'-OMe-nucleotide
  modified_base (6)..(6): 2'-fluoro-nucleotide
  modified_base (7)..(7): 2'-OMe-nucleotide
  modified_base (8)..(8): 2'-fluoro-nucleotide
  modified_base (9)..(9): 2'-OMe-nucleotide
  modified_base (10)..(10): 2'-fluoro-nucleotide
  modified_base (11)..(11): 2'-OMe-nucleotide
  modified_base (12)..(12): 2'-fluoro-nucleotide
  modified_base (13)..(13): 2'-OMe-nucleotide
  modified_base (14)..(14): 2'-fluoro-nucleotide
  modified_base (15)..(15): 2'-OMe-nucleotide
  modified_base (16)..(16): 2'-fluoro-nucleotide
  modified_base (17)..(17): 2'-OMe-nucleotide
  modified_base (18)..(18): 2'-fluoro-nucleotide
  modified_base (19)..(19): 2'-OMe-nucleotide
  modified_base (20)..(20): 2'-fluoro-nucleotide
  modified_base (21)..(21): 2'-OMe-nucleotide
  modified_base (22)..(22): 2'-fluoro-nucleotide
  modified_base (23)..(23): Inverted nucleotide
ccacuaccacugucacaggaagt

SEQ ID NO: 729 - DNA, 23 bp, Artificial Sequence
  source: /note="Description of Artificial Sequence: Synthetic oligonucleotide"
  source: /note="Description of Combined DNA/RNA Molecule: Synthetic oligonucleotide"
  modified_base (1)..(1): 2'-OMe-nucleotide
  modified_base (2)..(2): 2'-OMe-nucleotide
  modified_base (3)..(3): 2'-OMe-nucleotide
  modified_base (4)..(4): 2'-fluoro-nucleotide
  modified_base (5)..(5): 2'-OMe-nucleotide
  modified_base (6)..(6): 2'-fluoro-nucleotide
  modified_base (7)..(7): 2'-OMe-nucleotide
  modified_base (8)..(8): 2'-fluoro-nucleotide
  modified_base (9)..(9): 2'-OMe-nucleotide
  modified_base (10)..(10): 2'-fluoro-nucleotide
  modified_base (11)..(11): 2'-OMe-nucleotide
  modified_base (12)..(12): 2'-fluoro-nucleotide
  modified_base (13)..(13): 2'-OMe-nucleotide
  modified_base (14)..(14): 2'-fluoro-nucleotide
  modified_base (15)..(15): 2'-OMe-nucleotide
  modified_base (16)..(16): 2'-fluoro-nucleotide
  modified_base (17)..(17): 2'-OMe-nucleotide
  modified_base (18)..(18): 2'-fluoro-nucleotide
  modified_base (19)..(19): 2'-OMe-nucleotide
  modified_base (20)..(20): 2'-fluoro-nucleotide
  modified_base (21)..(21): 2'-OMe-nucleotide
  modified_base (22)..(22): 2'-fluoro-nucleotide
  modified_base (23)..(23): Inverted nucleotide
ccacugcaaccugacgcaaugut

SEQ ID NO: 730 - DNA, 23 bp, Artificial Sequence
  source: /note="Description of Artificial Sequence: Synthetic oligonucleotide"
  source: /note="Description of Combined DNA/RNA Molecule: Synthetic oligonucleotide"
  modified_base (1)..(1): 2'-OMe-nucleotide
  modified_base (2)..(2): 2'-OMe-nucleotide
  modified_base (3)..(3): 2'-OMe-nucleotide
  modified_base (4)..(4): 2'-fluoro-nucleotide
  modified_base (5)..(5): 2'-OMe-nucleotide
  modified_base (6)..(6): 2'-fluoro-nucleotide
  modified_base (7)..(7): 2'-OMe-nucleotide
  modified_base (8)..(8): 2'-fluoro-nucleotide
  modified_base (9)..(9): 2'-OMe-nucleotide
  modified_base (10)..(10): 2'-fluoro-nucleotide
  modified_base (11)..(11): 2'-OMe-nucleotide
  modified_base (12)..(12): 2'-fluoro-nucleotide
  modified_base (13)..(13): 2'-OMe-nucleotide
  modified_base (14)..(14): 2'-fluoro-nucleotide
  modified_base (15)..(15): 2'-OMe-nucleotide
  modified_base (16)..(16): 2'-fluoro-nucleotide
  modified_base (17)..(17): 2'-OMe-nucleotide
  modified_base (18)..(18): 2'-fluoro-nucleotide
  modified_base (19)..(19): 2'-OMe-nucleotide
  modified_base (20)..(20): 2'-fluoro-nucleotide
  modified_base (21)..(21): 2'-OMe-nucleotide
  modified_base (22)..(22): 2'-fluoro-nucleotide
  modified_base (23)..(23): Inverted nucleotide
ccaugcaaccugacgcaauguct

SEQ ID NO: 731 - DNA, 23 bp, Artificial Sequence
  source: /note="Description of Artificial Sequence: Synthetic oligonucleotide"
  source: /note="Description of Combined DNA/RNA Molecule: Synthetic oligonucleotide"
  modified_base (1)..(1): 2'-OMe-nucleotide
  modified_base (2)..(2): 2'-OMe-nucleotide
  modified_base (3)..(3): 2'-OMe-nucleotide
  modified_base (4)..(4): 2'-fluoro-nucleotide
  modified_base (5)..(5): 2'-OMe-nucleotide
  modified_base (6)..(6): 2'-fluoro-nucleotide
  modified_base (7)..(7): 2'-OMe-nucleotide
  modified_base (8)..(8): 2'-fluoro-nucleotide
  modified_base (9)..(9): 2'-OMe-nucleotide
  modified_base (10)..(10): 2'-fluoro-nucleotide
  modified_base (11)..(11): 2'-OMe-nucleotide
  modified_base (12)..(12): 2'-fluoro-nucleotide
  modified_base (13)..(13): 2'-OMe-nucleotide
  modified_base (14)..(14): 2'-fluoro-nucleotide
  modified_base (15)..(15): 2'-OMe-nucleotide
  modified_base (16)..(16): 2'-fluoro-nucleotide
  modified_base (17)..(17): 2'-OMe-nucleotide
  modified_base (18)..(18): 2'-fluoro-nucleotide
  modified_base (19)..(19): 2'-OMe-nucleotide
  modified_base (20)..(20): 2'-fluoro-nucleotide
  modified_base (21)..(21): 2'-OMe-nucleotide
  modified_base (22)..(22): 2'-fluoro-nucleotide
  modified_base (23)..(23): Inverted nucleotide
ccagcaaccugacgcaaugucct

SEQ ID NO: 732 - DNA, 23 bp, Artificial Sequence
  source: /note="Description of Artificial Sequence: Synthetic oligonucleotide"
  source: /note="Description of Combined DNA/RNA Molecule: Synthetic oligonucleotide"
  modified_base (1)..(1): 2'-OMe-nucleotide
  modified_base (2)..(2): 2'-OMe-nucleotide
  modified_base (3)..(3): 2'-OMe-nucleotide
  modified_base (4)..(4): 2'-fluoro-nucleotide
  modified_base (5)..(5): 2'-OMe-nucleotide
  modified_base (6)..(6): 2'-fluoro-nucleotide
  modified_base (7)..(7): 2'-OMe-nucleotide
  modified_base (8)..(8): 2'-fluoro-nucleotide
  modified_base (9)..(9): 2'-OMe-nucleotide
  modified_base (10)..(10): 2'-fluoro-nucleotide
  modified_base (11)..(11): 2'-OMe-nucleotide
  modified_base (12)..(12): 2'-fluoro-nucleotide
  modified_base (13)..(13): 2'-OMe-nucleotide
  modified_base (14)..(14): 2'-fluoro-nucleotide
  modified_base (15)..(15): 2'-OMe-nucleotide
  modified_base (16)..(16): 2'-fluoro-nucleotide
  modified_base (17)..(17): 2'-OMe-nucleotide
  modified_base (18)..(18): 2'-fluoro-nucleotide
  modified_base (19)..(19): 2'-OMe-nucleotide
  modified_base (20)..(20): 2'-fluoro-nucleotide
  modified_base (21)..(21): 2'-OMe-nucleotide
  modified_base (22)..(22): 2'-fluoro-nucleotide
  modified_base (23)..(23): Inverted nucleotide
ccacugaaaacagcacuggggut

SEQ ID NO: 733 - DNA, 23 bp, Artificial Sequence
  source: /note="Description of Artificial Sequence: Synthetic oligonucleotide"
  source: /note="Description of Combined DNA/RNA Molecule: Synthetic oligonucleotide"
  modified_base (1)..(1): 2'-OMe-nucleotide
  modified_base (2)..(2): 2'-OMe-nucleotide
  modified_base (3)..(3): 2'-OMe-nucleotide
  modified_base (4)..(4): 2'-fluoro-nucleotide
  modified_base (5)..(5): 2'-OMe-nucleotide
  modified_base (6)..(6): 2'-fluoro-nucleotide
  modified_base (7)..(7): 2'-OMe-nucleotide
  modified_base (8)..(8): 2'-fluoro-nucleotide
  modified_base (9)..(9): 2'-OMe-nucleotide
  modified_base (10)..(10): 2'-fluoro-nucleotide
  modified_base (11)..(11): 2'-OMe-nucleotide
  modified_base (12)..(12): 2'-fluoro-nucleotide
  modified_base (13)..(13): 2'-OMe-nucleotide
  modified_base (14)..(14): 2'-fluoro-nucleotide
  modified_base (15)..(15): 2'-OMe-nucleotide
  modified_base (16)..(16): 2'-fluoro-nucleotide
  modified_base (17)..(17): 2'-OMe-nucleotide
  modified_base (18)..(18): 2'-fluoro-nucleotide
  modified_base (19)..(19): 2'-OMe-nucleotide
  modified_base (20)..(20): 2'-fluoro-nucleotide
  modified_base (21)..(21): 2'-OMe-nucleotide
  modified_base (22)..(22): 2'-fluoro-nucleotide
  modified_base (23)..(23): Inverted nucleotide
ccacagaguuaucgaggcacact

SEQ ID NO: 734 - DNA, 23 bp, Artificial Sequence
  source: /note="Description of Artificial Sequence: Synthetic oligonucleotide"
  source: /note="Description of Combined DNA/RNA Molecule: Synthetic oligonucleotide"
  modified_base (1)..(1): 2'-OMe-nucleotide
  modified_base (2)..(2): 2'-OMe-nucleotide
  modified_base (3)..(3): 2'-OMe-nucleotide
  modified_base (4)..(4): 2'-fluoro-nucleotide
  modified_base (5)..(5): 2'-OMe-nucleotide
  modified_base (6)..(6): 2'-fluoro-nucleotide
  modified_base (7)..(7): 2'-OMe-nucleotide
  modified_base (8)..(8): 2'-fluoro-nucleotide
  modified_base (9)..(9): 2'-OMe-nucleotide
  modified_base (10)..(10): 2'-fluoro-nucleotide
  modified_base (11)..(11): 2'-OMe-nucleotide
  modified_base (12)..(12): 2'-fluoro-nucleotide
  modified_base (13)..(13): 2'-OMe-nucleotide
  modified_base (14)..(14): 2'-fluoro-nucleotide
  modified_base (15)..(15): 2'-OMe-nucleotide
  modified_base (16)..(16): 2'-fluoro-nucleotide
  modified_base (17)..(17): 2'-OMe-nucleotide
  modified_base (18)..(18): 2'-fluoro-nucleotide
  modified_base (19)..(19): 2'-OMe-nucleotide
  modified_base (20)..(20): 2'-fluoro-nucleotide
  modified_base (21)..(21): 2'-OMe-nucleotide
  modified_base (22)..(22): 2'-fluoro-nucleotide
  modified_base (23)..(23): Inverted nucleotide
ccaagaguuaucgaggcacacut

SEQ ID NO: 735 - DNA, 23 bp, Artificial Sequence
  source: /note="Description of Artificial Sequence: Synthetic oligonucleotide"
  source: /note="Description of Combined DNA/RNA Molecule: Synthetic oligonucleotide"
  modified_base (1)..(1): 2'-OMe-nucleotide
  modified_base (2)..(2): 2'-OMe-nucleotide
  modified_base (3)..(3): 2'-OMe-nucleotide
  modified_base (4)..(4): 2'-fluoro-nucleotide
  modified_base (5)..(5): 2'-OMe-nucleotide
  modified_base (6)..(6): 2'-fluoro-nucleotide
  modified_base (7)..(7): 2'-OMe-nucleotide
  modified_base (8)..(8): 2'-fluoro-nucleotide
  modified_base (9)..(9): 2'-OMe-nucleotide
  modified_base (10)..(10): 2'-fluoro-nucleotide
  modified_base (11)..(11): 2'-OMe-nucleotide
  modified_base (12)..(12): 2'-fluoro-nucleotide
  modified_base (13)..(13): 2'-OMe-nucleotide
  modified_base (14)..(14): 2'-fluoro-nucleotide
  modified_base (15)..(15): 2'-OMe-nucleotide
  modified_base (16)..(16): 2'-fluoro-nucleotide
  modified_base (17)..(17): 2'-OMe-nucleotide
  modified_base (18)..(18): 2'-fluoro-nucleotide
  modified_base (19)..(19): 2'-OMe-nucleotide
  modified_base (20)..(20): 2'-fluoro-nucleotide
  modified_base (21)..(21): 2'-OMe-nucleotide
  modified_base (22)..(22): 2'-fluoro-nucleotide
  modified_base (23)..(23): Inverted nucleotide
ccagaguuaucgaggcacacuct

SEQ ID NO: 736 - DNA, 23 bp, Artificial Sequence
  source: /note="Description of Artificial Sequence: Synthetic oligonucleotide"
  source: /note="Description of Combined DNA/RNA Molecule: Synthetic oligonucleotide"
  modified_base (1)..(1): 2'-OMe-nucleotide
  modified_base (2)..(2): 2'-OMe-nucleotide
  modified_base (3)..(3): 2'-OMe-nucleotide
  modified_base (4)..(4): 2'-fluoro-nucleotide
  modified_base (5)..(5): 2'-OMe-nucleotide
  modified_base (6)..(6): 2'-fluoro-nucleotide
  modified_base (7)..(7): 2'-OMe-nucleotide
  modified_base (8)..(8): 2'-fluoro-nucleotide
  modified_base (9)..(9): 2'-OMe-nucleotide
  modified_base (10)..(10): 2'-fluoro-nucleotide
  modified_base (11)..(11): 2'-OMe-nucleotide
  modified_base (12)..(12): 2'-fluoro-nucleotide
  modified_base (13)..(13): 2'-OMe-nucleotide
  modified_base (14)..(14): 2'-fluoro-nucleotide
  modified_base (15)..(15): 2'-OMe-nucleotide
  modified_base (16)..(16): 2'-fluoro-nucleotide
  modified_base (17)..(17): 2'-OMe-nucleotide
  modified_base (18)..(18): 2'-fluoro-nucleotide
  modified_base (19)..(19): 2'-OMe-nucleotide
  modified_base (20)..(20): 2'-fluoro-nucleotide
  modified_base (21)..(21): 2'-OMe-nucleotide
  modified_base (22)..(22): 2'-fluoro-nucleotide
  modified_base (23)..(23): Inverted nucleotide
ccaaguuaucgaggcacacucut

SEQ ID NO: 737 - DNA, 23 bp, Artificial Sequence
  source: /note="Description of Artificial Sequence: Synthetic oligonucleotide"
  source: /note="Description of Combined DNA/RNA Molecule: Synthetic oligonucleotide"
  modified_base (1)..(1): 2'-OMe-nucleotide
  modified_base (2)..(2): 2'-OMe-nucleotide
  modified_base (3)..(3): 2'-OMe-nucleotide
  modified_base (4)..(4): 2'-fluoro-nucleotide
  modified_base (5)..(5): 2'-OMe-nucleotide
  modified_base (6)..(6): 2'-fluoro-nucleotide
  modified_base (7)..(7): 2'-OMe-nucleotide
  modified_base (8)..(8): 2'-fluoro-nucleotide
  modified_base (9)..(9): 2'-OMe-nucleotide
  modified_base (10)..(10): 2'-fluoro-nucleotide
  modified_base (11)..(11): 2'-OMe-nucleotide
  modified_base (12)..(12): 2'-fluoro-nucleotide
  modified_base (13)..(13): 2'-OMe-nucleotide
  modified_base (14)..(14): 2'-fluoro-nucleotide
  modified_base (15)..(15): 2'-OMe-nucleotide
  modified_base (16)..(16): 2'-fluoro-nucleotide
  modified_base (17)..(17): 2'-OMe-nucleotide
  modified_base (18)..(18): 2'-fluoro-nucleotide
  modified_base (19)..(19): 2'-OMe-nucleotide
  modified_base (20)..(20): 2'-fluoro-nucleotide
  modified_base (21)..(21): 2'-OMe-nucleotide
  modified_base (22)..(22): 2'-fluoro-nucleotide
  modified_base (23)..(23): Inverted nucleotide
ccaguuaucgaggcacacucuct

SEQ ID NO: 738 - DNA, 23 bp, Artificial Sequence
  source: /note="Description of Artificial Sequence: Synthetic oligonucleotide"
  source: /note="Description of Combined DNA/RNA Molecule: Synthetic oligonucleotide"
  modified_base (1)..(1): 2'-OMe-nucleotide
  modified_base (2)..(2): 2'-OMe-nucleotide
  modified_base (3)..(3): 2'-OMe-nucleotide
  modified_base (4)..(4): 2'-fluoro-nucleotide
  modified_base (5)..(5): 2'-OMe-nucleotide
  modified_base (6)..(6): 2'-fluoro-nucleotide
  modified_base (7)..(7): 2'-OMe-nucleotide
  modified_base (8)..(8): 2'-fluoro-nucleotide
  modified_base (9)..(9): 2'-OMe-nucleotide
  modified_base (10)..(10): 2'-fluoro-nucleotide
  modified_base (11)..(11): 2'-OMe-nucleotide
  modified_base (12)..(12): 2'-fluoro-nucleotide
  modified_base (13)..(13): 2'-OMe-nucleotide
  modified_base (14)..(14): 2'-fluoro-nucleotide
  modified_base (15)..(15): 2'-OMe-nucleotide
  modified_base (16)..(16): 2'-fluoro-nucleotide
  modified_base (17)..(17): 2'-OMe-nucleotide
  modified_base (18)..(18): 2'-fluoro-nucleotide
  modified_base (19)..(19): 2'-OMe-nucleotide
  modified_base (20)..(20): 2'-fluoro-nucleotide
  modified_base (21)..(21): 2'-OMe-nucleotide
  modified_base (22)..(22): 2'-fluoro-nucleotide
  modified_base (23)..(23): Inverted nucleotide
ccauuaucgaggcacacucucct

SEQ ID NO: 739 - DNA, 23 bp, Artificial Sequence
  source: /note="Description of Artificial Sequence: Synthetic oligonucleotide"
  source: /note="Description of Combined DNA/RNA Molecule: Synthetic oligonucleotide"
  modified_base (1)..(1): 2'-OMe-nucleotide
  modified_base (2)..(2): 2'-OMe-nucleotide
  modified_base (3)..(3): 2'-OMe-nucleotide
  modified_base (4)..(4): 2'-fluoro-nucleotide
  modified_base (5)..(5): 2'-OMe-nucleotide
  modified_base (6)..(6): 2'-fluoro-nucleotide
  modified_base (7)..(7): 2'-OMe-nucleotide
  modified_base (8)..(8): 2'-fluoro-nucleotide
  modified_base (9)..(9): 2'-OMe-nucleotide
  modified_base (10)..(10): 2'-fluoro-nucleotide
  modified_base (11)..(11): 2'-OMe-nucleotide
  modified_base (12)..(12): 2'-fluoro-nucleotide
  modified_base (13)..(13): 2'-OMe-nucleotide
  modified_base (14)..(14): 2'-fluoro-nucleotide
  modified_base (15)..(15): 2'-OMe-nucleotide
  modified_base (16)..(16): 2'-fluoro-nucleotide
  modified_base (17)..(17): 2'-OMe-nucleotide
  modified_base (18)..(18): 2'-fluoro-nucleotide
  modified_base (19)..(19): 2'-OMe-nucleotide
  modified_base (20)..(20): 2'-fluoro-nucleotide
  modified_base (21)..(21): 2'-OMe-nucleotide
  modified_base (22)..(22): 2'-fluoro-nucleotide
  modified_base (23)..(23): Inverted nucleotide
ccauaucgaggcacacucuccat

SEQ ID NO: 740 - DNA, 23 bp, Artificial Sequence
  source: /note="Description of Artificial Sequence: Synthetic oligonucleotide"
  source: /note="Description of Combined DNA/RNA Molecule: Synthetic oligonucleotide"
  modified_base (1)..(1): 2'-OMe-nucleotide
  modified_base (2)..(2): 2'-OMe-nucleotide
  modified_base (3)..(3): 2'-OMe-nucleotide
  modified_base (4)..(4): 2'-fluoro-nucleotide
  modified_base (5)..(5): 2'-OMe-nucleotide
  modified_base (6)..(6): 2'-fluoro-nucleotide
  modified_base (7)..(7): 2'-OMe-nucleotide
  modified_base (8)..(8): 2'-fluoro-nucleotide
  modified_base (9)..(9): 2'-OMe-nucleotide
  modified_base (10)..(10): 2'-fluoro-nucleotide
  modified_base (11)..(11): 2'-OMe-nucleotide
  modified_base (12)..(12): 2'-fluoro-nucleotide
  modified_base (13)..(13): 2'-OMe-nucleotide
  modified_base (14)..(14): 2'-fluoro-nucleotide
  modified_base (15)..(15): 2'-OMe-nucleotide
  modified_base (16)..(16): 2'-fluoro-nucleotide
  modified_base (17)..(17): 2'-OMe-nucleotide
  modified_base (18)..(18): 2'-fluoro-nucleotide
  modified_base (19)..(19): 2'-OMe-nucleotide
  modified_base (20)..(20): 2'-fluoro-nucleotide
  modified_base (21)..(21): 2'-OMe-nucleotide
  modified_base (22)..(22): 2'-fluoro-nucleotide
  modified_base (23)..(23): Inverted nucleotide
ccaaucgaggcacacucuccact

SEQ ID NO: 741 - DNA, 23 bp, Artificial Sequence
  source: /note="Description of Artificial Sequence: Synthetic oligonucleotide"
  source: /note="Description of Combined DNA/RNA Molecule: Synthetic oligonucleotide"
  modified_base (1)..(1): 2'-OMe-nucleotide
  modified_base (2)..(2): 2'-OMe-nucleotide
  modified_base (3)..(3): 2'-OMe-nucleotide
  modified_base (4)..(4): 2'-fluoro-nucleotide
  modified_base (5)..(5): 2'-OMe-nucleotide
  modified_base (6)..(6): 2'-fluoro-nucleotide
  modified_base (7)..(7): 2'-OMe-nucleotide
  modified_base (8)..(8): 2'-fluoro-nucleotide
  modified_base (9)..(9): 2'-OMe-nucleotide
  modified_base (10)..(10): 2'-fluoro-nucleotide
  modified_base (11)..(11): 2'-OMe-nucleotide
  modified_base (12)..(12): 2'-fluoro-nucleotide
  modified_base (13)..(13): 2'-OMe-nucleotide
  modified_base (14)..(14): 2'-fluoro-nucleotide
  modified_base (15)..(15): 2'-OMe-nucleotide
  modified_base (16)..(16): 2'-fluoro-nucleotide
  modified_base (17)..(17): 2'-OMe-nucleotide
  modified_base (18)..(18): 2'-fluoro-nucleotide
  modified_base (19)..(19): 2'-OMe-nucleotide
  modified_base (20)..(20): 2'-fluoro-nucleotide
  modified_base (21)..(21): 2'-OMe-nucleotide
  modified_base (22)..(22): 2'-fluoro-nucleotide
  modified_base (23)..(23): Inverted nucleotide
ccaggcacacucuccaccacuat

SEQ ID NO: 742 - DNA, 23 bp, Artificial Sequence
  source: /note="Description of Artificial Sequence: Synthetic oligonucleotide"
  source: /note="Description of Combined DNA/RNA Molecule: Synthetic oligonucleotide"
  modified_base (1)..(1): 2'-OMe-nucleotide
  modified_base (2)..(2): 2'-OMe-nucleotide
  modified_base (3)..(3): 2'-OMe-nucleotide
  modified_base (4)..(4): 2'-fluoro-nucleotide
  modified_base (5)..(5): 2'-OMe-nucleotide
  modified_base (6)..(6): 2'-fluoro-nucleotide
  modified_base (7)..(7): 2'-OMe-nucleotide
  modified_base (8)..(8): 2'-fluoro-nucleotide
  modified_base (9)..(9): 2'-OMe-nucleotide
  modified_base (10)..(10): 2'-fluoro-nucleotide
  modified_base (11)..(11): 2'-OMe-nucleotide
  modified_base (12)..(12): 2'-fluoro-nucleotide
  modified_base (13)..(13): 2'-OMe-nucleotide
  modified_base (14)..(14): 2'-fluoro-nucleotide
  modified_base (15)..(15): 2'-OMe-nucleotide
  modified_base (16)..(16): 2'-fluoro-nucleotide
  modified_base (17)..(17): 2'-OMe-nucleotide
  modified_base (18)..(18): 2'-fluoro-nucleotide
  modified_base (19)..(19): 2'-OMe-nucleotide
  modified_base (20)..(20): 2'-fluoro-nucleotide
  modified_base (21)..(21): 2'-OMe-nucleotide
  modified_base (22)..(22): 2'-fluoro-nucleotide
  modified_base (23)..(23): Inverted nucleotide
ccaucuccaccacuaucacaggt

SEQ ID NO: 743 - DNA, 23 bp, Artificial Sequence
  source: /note="Description of Artificial Sequence: Synthetic oligonucleotide"
  source: /note="Description of Combined DNA/RNA Molecule: Synthetic oligonucleotide"
  modified_base (1)..(1): 2'-OMe-nucleotide
  modified_base (2)..(2): 2'-OMe-nucleotide
  modified_base (3)..(3): 2'-OMe-nucleotide
  modified_base (4)..(4): 2'-fluoro-nucleotide
  modified_base (5)..(5): 2'-OMe-nucleotide
  modified_base (6)..(6): 2'-fluoro-nucleotide
  modified_base (7)..(7): 2'-OMe-nucleotide
  modified_base (8)..(8): 2'-fluoro-nucleotide
  modified_base (9)..(9): 2'-OMe-nucleotide
  modified_base (10)..(10): 2'-fluoro-nucleotide
  modified_base (11)..(11): 2'-OMe-nucleotide
  modified_base (12)..(12): 2'-fluoro-nucleotide
  modified_base (13)..(13): 2'-OMe-nucleotide
  modified_base (14)..(14): 2'-fluoro-nucleotide
  modified_base (15)..(15): 2'-OMe-nucleotide
  modified_base (16)..(16): 2'-fluoro-nucleotide
  modified_base (17)..(17): 2'-OMe-nucleotide
  modified_base (18)..(18): 2'-fluoro-nucleotide
  modified_base (19)..(19): 2'-OMe-nucleotide
  modified_base (20)..(20): 2'-fluoro-nucleotide
  modified_base (21)..(21): 2'-OMe-nucleotide
  modified_base (22)..(22): 2'-fluoro-nucleotide
  modified_base (23)..(23): Inverted nucleotide
ccagucuaugacaccacauuggt

SEQ ID NO: 744 - DNA, 23 bp, Artificial Sequence
  source: /note="Description of Artificial Sequence: Synthetic oligonucleotide"
  source: /note="Description of Combined DNA/RNA Molecule: Synthetic oligonucleotide"
  modified_base (1)..(1): 2'-OMe-nucleotide
  modified_base (2)..(2): 2'-OMe-nucleotide
  modified_base (3)..(3): 2'-OMe-nucleotide
  modified_base (4)..(4): 2'-fluoro-nucleotide
  modified_base (5)..(5): 2'-OMe-nucleotide
  modified_base (6)..(6): 2'-fluoro-nucleotide
  modified_base (7)..(7): 2'-OMe-nucleotide
  modified_base (8)..(8): 2'-fluoro-nucleotide
  modified_base (9)..(9): 2'-OMe-nucleotide
  modified_base (10)..(10): 2'-fluoro-nucleotide
  modified_base (11)..(11): 2'-OMe-nucleotide
  modified_base (12)..(12): 2'-fluoro-nucleotide
  modified_base (13)..(13): 2'-OMe-nucleotide
  modified_base (14)..(14): 2'-fluoro-nucleotide
  modified_base (15)..(15): 2'-OMe-nucleotide
  modified_base (16)..(16): 2'-fluoro-nucleotide
  modified_base (17)..(17): 2'-OMe-nucleotide
  modified_base (18)..(18): 2'-fluoro-nucleotide
  modified_base (19)..(19): 2'-OMe-nucleotide
  modified_base (20)..(20): 2'-fluoro-nucleotide
  modified_base (21)..(21): 2'-OMe-nucleotide
  modified_base (22)..(22): 2'-fluoro-nucleotide
  modified_base (23)..(23): Inverted nucleotide
ccauaugacaccacauuggcaut

SEQ ID NO: 745 - DNA, 23 bp, Artificial Sequence
  source: /note="Description of Artificial Sequence: Synthetic oligonucleotide"
  source: /note="Description of Combined DNA/RNA Molecule: Synthetic oligonucleotide"
  modified_base (1)..(1): 2'-OMe-nucleotide
  modified_base (2)..(2): 2'-OMe-nucleotide
  modified_base (3)..(3): 2'-OMe-nucleotide
  modified_base (4)..(4): 2'-fluoro-nucleotide
  modified_base (5)..(5): 2'-OMe-nucleotide
  modified_base (6)..(6): 2'-fluoro-nucleotide
  modified_base (7)..(7): 2'-OMe-nucleotide
  modified_base (8)..(8): 2'-fluoro-nucleotide
  modified_base (9)..(9): 2'-OMe-nucleotide
  modified_base (10)..(10): 2'-fluoro-nucleotide
  modified_base (11)..(11): 2'-OMe-nucleotide
  modified_base (12)..(12): 2'-fluoro-nucleotide
  modified_base (13)..(13): 2'-OMe-nucleotide
  modified_base (14)..(14): 2'-fluoro-nucleotide
  modified_base (15)..(15): 2'-OMe-nucleotide
  modified_base (16)..(16): 2'-fluoro-nucleotide
  modified_base (17)..(17): 2'-OMe-nucleotide
  modified_base (18)..(18): 2'-fluoro-nucleotide
  modified_base (19)..(19): 2'-OMe-nucleotide
  modified_base (20)..(20): 2'-fluoro-nucleotide
  modified_base (21)..(21): 2'-OMe-nucleotide
  modified_base (22)..(22): 2'-fluoro-nucleotide
  modified_base (23)..(23): Inverted nucleotide
ccaacaccacauuggcaucggat

SEQ ID NO: 746 - DNA, 23 bp, Artificial Sequence
  source: /note="Description of Artificial Sequence: Synthetic oligonucleotide"
  source: /note="Description of Combined DNA/RNA Molecule: Synthetic oligonucleotide"
  modified_base (1)..(1): 2'-OMe-nucleotide
  modified_base (2)..(2): 2'-OMe-nucleotide
  modified_base (3)..(3): 2'-OMe-nucleotide
  modified_base (4)..(4): 2'-fluoro-nucleotide
  modified_base (5)..(5): 2'-OMe-nucleotide
  modified_base (6)..(6): 2'-fluoro-nucleotide
  modified_base (7)..(7): 2'-OMe-nucleotide
  modified_base (8)..(8): 2'-fluoro-nucleotide
  modified_base (9)..(9): 2'-OMe-nucleotide
  modified_base (10)..(10): 2'-fluoro-nucleotide
  modified_base (11)..(11): 2'-OMe-nucleotide
  modified_base (12)..(12): 2'-fluoro-nucleotide
  modified_base (13)..(13): 2'-OMe-nucleotide
  modified_base (14)..(14): 2'-fluoro-nucleotide
  modified_base (15)..(15): 2'-OMe-nucleotide
  modified_base (16)..(16): 2'-fluoro-nucleotide
  modified_base (17)..(17): 2'-OMe-nucleotide
  modified_base (18)..(18): 2'-fluoro-nucleotide
  modified_base (19)..(19): 2'-OMe-nucleotide
  modified_base (20)..(20): 2'-fluoro-nucleotide
  modified_base (21)..(21): 2'-OMe-nucleotide
  modified_base (22)..(22): 2'-fluoro-nucleotide
  modified_base (23)..(23): Inverted nucleotide
ccacaccacauuggcaucggagt

SEQ ID NO: 747 - DNA, 23 bp, Artificial Sequence
  source: /note="Description of Artificial Sequence: Synthetic oligonucleotide"
  source: /note="Description of Combined DNA/RNA Molecule: Synthetic oligonucleotide"
  modified_base (1)..(1): 2'-OMe-nucleotide
  modified_base (2)..(2): 2'-OMe-nucleotide
  modified_base (3)..(3): 2'-OMe-nucleotide
  modified_base (4)..(4): 2'-fluoro-nucleotide
  modified_base (5)..(5): 2'-OMe-nucleotide
  modified_base (6)..(6): 2'-fluoro-nucleotide
  modified_base (7)..(7): 2'-OMe-nucleotide
  modified_base (8)..(8): 2'-fluoro-nucleotide
  modified_base (9)..(9): 2'-OMe-nucleotide
  modified_base (10)..(10): 2'-fluoro-nucleotide
  modified_base (11)..(11): 2'-OMe-nucleotide
  modified_base (12)..(12): 2'-fluoro-nucleotide
  modified_base (13)..(13): 2'-OMe-nucleotide
  modified_base (14)..(14): 2'-fluoro-nucleotide
  modified_base (15)..(15): 2'-OMe-nucleotide
  modified_base (16)..(16): 2'-fluoro-nucleotide
  modified_base (17)..(17): 2'-OMe-nucleotide
  modified_base (18)..(18): 2'-fluoro-nucleotide
  modified_base (19)..(19): 2'-OMe-nucleotide
  modified_base (20)..(20): 2'-fluoro-nucleotide
  modified_base (21)..(21): 2'-OMe-nucleotide
  modified_base (22)..(22): 2'-fluoro-nucleotide
  modified_base (23)..(23): Inverted nucleotide
ccaaccacauuggcaucggaggt

SEQ ID NO: 748 - DNA, 23 bp, Artificial Sequence
  source: /note="Description of Artificial Sequence: Synthetic oligonucleotide"
  source: /note="Description of Combined DNA/RNA Molecule: Synthetic oligonucleotide"
  modified_base (1)..(1): 2'-OMe-nucleotide
  modified_base (2)..(2): 2'-OMe-nucleotide
  modified_base (3)..(3): 2'-OMe-nucleotide
  modified_base (4)..(4): 2'-fluoro-nucleotide
  modified_base (5)..(5): 2'-OMe-nucleotide
  modified_base (6)..(6): 2'-fluoro-nucleotide
  modified_base (7)..(7): 2'-OMe-nucleotide
  modified_base (8)..(8): 2'-fluoro-nucleotide
  modified_base (9)..(9): 2'-OMe-nucleotide
  modified_base (10)..(10): 2'-fluoro-nucleotide
  modified_base (11)..(11): 2'-OMe-nucleotide
  modified_base (12)..(12): 2'-fluoro-nucleotide
  modified_base (13)..(13): 2'-OMe-nucleotide
  modified_base (14)..(14): 2'-fluoro-nucleotide
  modified_base (15)..(15): 2'-OMe-nucleotide
  modified_base (16)..(16): 2'-fluoro-nucleotide
  modified_base (17)..(17): 2'-OMe-nucleotide
  modified_base (18)..(18): 2'-fluoro-nucleotide
  modified_base (19)..(19): 2'-OMe-nucleotide
  modified_base (20)..(20): 2'-fluoro-nucleotide
  modified_base (21)..(21): 2'-OMe-nucleotide
  modified_base (22)..(22): 2'-fluoro-nucleotide
  modified_base (23)..(23): Inverted nucleotide
ccaccacauuggcaucggaggat

SEQ ID NO: 749 - DNA, 23 bp, Artificial Sequence
  source: /note="Description of Artificial Sequence: Synthetic oligonucleotide"
  source: /note="Description of Combined DNA/RNA Molecule: Synthetic oligonucleotide"
  modified_base (1)..(1): 2'-OMe-nucleotide
  modified_base (2)..(2): 2'-OMe-nucleotide
  modified_base (3)..(3): 2'-OMe-nucleotide
  modified_base (4)..(4): 2'-fluoro-nucleotide
  modified_base (5)..(5): 2'-OMe-nucleotide
  modified_base (6)..(6): 2'-fluoro-nucleotide
  modified_base (7)..(7): 2'-OMe-nucleotide
  modified_base (8)..(8): 2'-fluoro-nucleotide
  modified_base (9)..(9): 2'-OMe-nucleotide
  modified_base (10)..(10): 2'-fluoro-nucleotide
  modified_base (11)..(11): 2'-OMe-nucleotide
  modified_base (12)..(12): 2'-fluoro-nucleotide
  modified_base (13)..(13): 2'-OMe-nucleotide
  modified_base (14)..(14): 2'-fluoro-nucleotide
  modified_base (15)..(15): 2'-OMe-nucleotide
  modified_base (16)..(16): 2'-fluoro-nucleotide
  modified_base (17)..(17): 2'-OMe-nucleotide
  modified_base (18)..(18): 2'-fluoro-nucleotide
  modified_base (19)..(19): 2'-OMe-nucleotide
  modified_base (20)..(20): 2'-fluoro-nucleotide
  modified_base (21)..(21): 2'-OMe-nucleotide
  modified_base (22)..(22): 2'-fluoro-nucleotide
  modified_base (23)..(23): Inverted nucleotide
ccacacauuggcaucggaggaut

SEQ ID NO: 750 - DNA, 23 bp, Artificial Sequence
  source: /note="Description of Artificial Sequence: Synthetic oligonucleotide"
  source: /note="Description of Combined DNA/RNA Molecule: Synthetic oligonucleotide"
  modified_base (1)..(1): 2'-OMe-nucleotide
  modified_base (2)..(2): 2'-OMe-nucleotide
  modified_base (3)..(3): 2'-OMe-nucleotide
  modified_base (4)..(4): 2'-fluoro-nucleotide
  modified_base (5)..(5): 2'-OMe-nucleotide
  modified_base (6)..(6): 2'-fluoro-nucleotide
  modified_base (7)..(7): 2'-OMe-nucleotide
  modified_base (8)..(8): 2'-fluoro-nucleotide
  modified_base (9)..(9): 2'-OMe-nucleotide
  modified_base (10)..(10): 2'-fluoro-nucleotide
  modified_base (11)..(11): 2'-OMe-nucleotide
  modified_base (12)..(12): 2'-fluoro-nucleotide
  modified_base (13)..(13): 2'-OMe-nucleotide
  modified_base (14)..(14): 2'-fluoro-nucleotide
  modified_base (15)..(15): 2'-OMe-nucleotide
  modified_base (16)..(16): 2'-fluoro-nucleotide
  modified_base (17)..(17): 2'-OMe-nucleotide
  modified_base (18)..(18): 2'-fluoro-nucleotide
  modified_base (19)..(19): 2'-OMe-nucleotide
  modified_base (20)..(20): 2'-fluoro-nucleotide
  modified_base (21)..(21): 2'-OMe-nucleotide
  modified_base (22)..(22): 2'-fluoro-nucleotide
  modified_base (23)..(23): Inverted nucleotide
ccaacauuggcaucggaggauct

SEQ ID NO: 751 - DNA, 23 bp, Artificial Sequence
  source: /note="Description of Artificial Sequence: Synthetic oligonucleotide"
  source: /note="Description of Combined DNA/RNA Molecule: Synthetic oligonucleotide"
  modified_base (1)..(1): 2'-OMe-nucleotide
  modified_base (2)..(2): 2'-OMe-nucleotide
  modified_base (3)..(3): 2'-OMe-nucleotide
  modified_base (4)..(4): 2'-fluoro-nucleotide
  modified_base (5)..(5): 2'-OMe-nucleotide
  modified_base (6)..(6): 2'-fluoro-nucleotide
  modified_base (7)..(7): 2'-OMe-nucleotide
  modified_base (8)..(8): 2'-fluoro-nucleotide
  modified_base (9)..(9): 2'-OMe-nucleotide
  modified_base (10)..(10): 2'-fluoro-nucleotide
  modified_base (11)..(11): 2'-OMe-nucleotide
  modified_base (12)..(12): 2'-fluoro-nucleotide
  modified_base (13)..(13): 2'-OMe-nucleotide
  modified_base (14)..(14): 2'-fluoro-nucleotide
  modified_base (15)..(15): 2'-OMe-nucleotide
  modified_base (16)..(16): 2'-fluoro-nucleotide
  modified_base (17)..(17): 2'-OMe-nucleotide
  modified_base (18)..(18): 2'-fluoro-nucleotide
  modified_base (19)..(19): 2'-OMe-nucleotide
  modified_base (20)..(20): 2'-fluoro-nucleotide
  modified_base (21)..(21): 2'-OMe-nucleotide
  modified_base (22)..(22): 2'-fluoro-nucleotide
  modified_base (23)..(23): Inverted nucleotide
ccacauuggcaucggaggaucct

SEQ ID NO: 752 - DNA, 23 bp, Artificial Sequence
  source: /note="Description of Artificial Sequence: Synthetic oligonucleotide"
  source: /note="Description of Combined DNA/RNA Molecule: Synthetic oligonucleotide"
  modified_base (1)..(1): 2'-OMe-nucleotide
  modified_base (2)..(2): 2'-OMe-nucleotide
  modified_base (3)..(3): 2'-OMe-nucleotide
  modified_base (4)..(4): 2'-fluoro-nucleotide
  modified_base (5)..(5): 2'-OMe-nucleotide
  modified_base (6)..(6): 2'-fluoro-nucleotide
  modified_base (7)..(7): 2'-OMe-nucleotide
  modified_base (8)..(8): 2'-fluoro-nucleotide
  modified_base (9)..(9): 2'-OMe-nucleotide
  modified_base (10)..(10): 2'-fluoro-nucleotide
  modified_base (11)..(11): 2'-OMe-nucleotide
  modified_base (12)..(12): 2'-fluoro-nucleotide
  modified_base (13)..(13): 2'-OMe-nucleotide
  modified_base (14)..(14): 2'-fluoro-nucleotide
  modified_base (15)..(15): 2'-OMe-nucleotide
  modified_base (16)..(16): 2'-fluoro-nucleotide
  modified_base (17)..(17): 2'-OMe-nucleotide
  modified_base (18)..(18): 2'-fluoro-nucleotide
  modified_base (19)..(19): 2'-OMe-nucleotide
  modified_base (20)..(20): 2'-fluoro-nucleotide
  modified_base (21)..(21): 2'-OMe-nucleotide
  modified_base (22)..(22): 2'-fluoro-nucleotide
  modified_base (23)..(23): Inverted nucleotide
ccaauuggcaucggaggauccct

SEQ ID NO: 753 - DNA, 23 bp, Artificial Sequence
  source: /note="Description of Artificial Sequence: Synthetic oligonucleotide"
  source: /note="Description of Combined DNA/RNA Molecule: Synthetic oligonucleotide"
  modified_base (1)..(1): 2'-OMe-nucleotide
  modified_base (2)..(2): 2'-OMe-nucleotide
  modified_base (3)..(3): 2'-OMe-nucleotide
  modified_base (4)..(4): 2'-fluoro-nucleotide
  modified_base (5)..(5): 2'-OMe-nucleotide
  modified_base (6)..(6): 2'-fluoro-nucleotide
  modified_base (7)..(7): 2'-OMe-nucleotide
  modified_base (8)..(8): 2'-fluoro-nucleotide
  modified_base (9)..(9): 2'-OMe-nucleotide
  modified_base (10)..(10): 2'-fluoro-nucleotide
  modified_base (11)..(11): 2'-OMe-nucleotide
  modified_base (12)..(12): 2'-fluoro-nucleotide
  modified_base (13)..(13): 2'-OMe-nucleotide
  modified_base (14)..(14): 2'-fluoro-nucleotide
  modified_base (15)..(15): 2'-OMe-nucleotide
  modified_base (16)..(16): 2'-fluoro-nucleotide
  modified_base (17)..(17): 2'-OMe-nucleotide
  modified_base (18)..(18): 2'-fluoro-nucleotide
  modified_base (19)..(19): 2'-OMe-nucleotide
  modified_base (20)..(20): 2'-fluoro-nucleotide
  modified_base (21)..(21): 2'-OMe-nucleotide
  modified_base (22)..(22): 2'-fluoro-nucleotide
  modified_base (23)..(23): Inverted nucleotide
ccaggcaucggaggaucccauut

SEQ ID NO: 754 - DNA, 23 bp, Artificial Sequence
  source: /note="Description of Artificial Sequence: Synthetic oligonucleotide"
  source: /note="Description of Combined DNA/RNA Molecule: Synthetic oligonucleotide"
  modified_base (1)..(1): 2'-OMe-nucleotide
  modified_base (2)..(2): 2'-OMe-nucleotide
  modified_base (3)..(3): 2'-OMe-nucleotide
  modified_base (4)..(4): 2'-fluoro-nucleotide
  modified_base (5)..(5): 2'-OMe-nucleotide
  modified_base (6)..(6): 2'-fluoro-nucleotide
  modified_base (7)..(7): 2'-OMe-nucleotide
  modified_base (8)..(8): 2'-fluoro-nucleotide
  modified_base (9)..(9): 2'-OMe-nucleotide
  modified_base (10)..(10): 2'-fluoro-nucleotide
  modified_base (11)..(11): 2'-OMe-nucleotide
  modified_base (12)..(12): 2'-fluoro-nucleotide
  modified_base (13)..(13): 2'-OMe-nucleotide
  modified_base (14)..(14): 2'-fluoro-nucleotide
  modified_base (15)..(15): 2'-OMe-nucleotide
  modified_base (16)..(16): 2'-fluoro-nucleotide
  modified_base (17)..(17): 2'-OMe-nucleotide
  modified_base (18)..(18): 2'-fluoro-nucleotide
  modified_base (19)..(19): 2'-OMe-nucleotide
  modified_base (20)..(20): 2'-fluoro-nucleotide
  modified_base (21)..(21): 2'-OMe-nucleotide
  modified_base (22)..(22): 2'-fluoro-nucleotide
  modified_base (23)..(23): Inverted nucleotide
ccacugcaaccugacacgaugut

SEQ ID NO: 755 - DNA, 23 bp, Artificial Sequence
  source: /note="Description of Artificial Sequence: Synthetic oligonucleotide"
  source: /note="Description of Combined DNA/RNA Molecule: Synthetic oligonucleotide"
  modified_base (1)..(1): 2'-OMe-nucleotide
  modified_base (2)..(2): 2'-OMe-nucleotide
  modified_base (3)..(3): 2'-OMe-nucleotide
  modified_base (4)..(4): 2'-fluoro-nucleotide
  modified_base (5)..(5): 2'-OMe-nucleotide
  modified_base (6)..(6): 2'-fluoro-nucleotide
  modified_base (7)..(7): 2'-OMe-nucleotide
  modified_base (8)..(8): 2'-fluoro-nucleotide
  modified_base (9)..(9): 2'-OMe-nucleotide
  modified_base (10)..(10): 2'-fluoro-nucleotide
  modified_base (11)..(11): 2'-OMe-nucleotide
  modified_base (12)..(12): 2'-fluoro-nucleotide
  modified_base (13)..(13): 2'-OMe-nucleotide
  modified_base (14)..(14): 2'-fluoro-nucleotide
  modified_base (15)..(15): 2'-OMe-nucleotide
  modified_base (16)..(16): 2'-fluoro-nucleotide
  modified_base (17)..(17): 2'-OMe-nucleotide
  modified_base (18)..(18): 2'-fluoro-nucleotide
  modified_base (19)..(19): 2'-OMe-nucleotide
  modified_base (20)..(20): 2'-fluoro-nucleotide
  modified_base (21)..(21): 2'-OMe-nucleotide
  modified_base (22)..(22): 2'-fluoro-nucleotide
  modified_base (23)..(23): Inverted nucleotide
ccaugcaaccugacacgauguct

SEQ ID NO: 756 - DNA, 23 bp, Artificial Sequence
  source: /note="Description of Artificial Sequence: Synthetic oligonucleotide"
  source: /note="Description of Combined DNA/RNA Molecule: Synthetic oligonucleotide"
  modified_base (1)..(1): 2'-OMe-nucleotide
  modified_base (2)..(2): 2'-OMe-nucleotide
  modified_base (3)..(3): 2'-OMe-nucleotide
  modified_base (4)..(4): 2'-fluoro-nucleotide
  modified_base (5)..(5): 2'-OMe-nucleotide
  modified_base (6)..(6): 2'-fluoro-nucleotide
  modified_base (7)..(7): 2'-OMe-nucleotide
  modified_base (8)..(8): 2'-fluoro-nucleotide
  modified_base (9)..(9): 2'-OMe-nucleotide
  modified_base (10)..(10): 2'-fluoro-nucleotide
  modified_base (11)..(11): 2'-OMe-nucleotide
  modified_base (12)..(12): 2'-fluoro-nucleotide
  modified_base (13)..(13): 2'-OMe-nucleotide
  modified_base (14)..(14): 2'-fluoro-nucleotide
  modified_base (15)..(15): 2'-OMe-nucleotide
  modified_base (16)..(16): 2'-fluoro-nucleotide
  modified_base (17)..(17): 2'-OMe-nucleotide
  modified_base (18)..(18): 2'-fluoro-nucleotide
  modified_base (19)..(19): 2'-OMe-nucleotide
  modified_base (20)..(20): 2'-fluoro-nucleotide
  modified_base (21)..(21): 2'-OMe-nucleotide
  modified_base (22)..(22): 2'-fluoro-nucleotide
  modified_base (23)..(23): Inverted nucleotide
ccagcaaccugacacgaugucct

SEQ ID NO: 757 - DNA, 23 bp, Artificial Sequence
  source: /note="Description of Artificial Sequence: Synthetic oligonucleotide"
  source: /note="Description of Combined DNA/RNA Molecule: Synthetic oligonucleotide"
  modified_base (1)..(1): 2'-OMe-nucleotide
  modified_base (2)..(2): 2'-OMe-nucleotide
  modified_base (3)..(3): 2'-OMe-nucleotide
  modified_base (4)..(4): 2'-fluoro-nucleotide
  modified_base (5)..(5): 2'-OMe-nucleotide
  modified_base (6)..(6): 2'-fluoro-nucleotide
  modified_base (7)..(7): 2'-OMe-nucleotide
  modified_base (8)..(8): 2'-fluoro-nucleotide
  modified_base (9)..(9): 2'-OMe-nucleotide
  modified_base (10)..(10): 2'-fluoro-nucleotide
  modified_base (11)..(11): 2'-OMe-nucleotide
  modified_base (12)..(12): 2'-fluoro-nucleotide
  modified_base (13)..(13): 2'-OMe-nucleotide
  modified_base (14)..(14): 2'-fluoro-nucleotide
  modified_base (15)..(15): 2'-OMe-nucleotide
  modified_base (16)..(16): 2'-fluoro-nucleotide
  modified_base (17)..(17): 2'-OMe-nucleotide
  modified_base (18)..(18): 2'-fluoro-nucleotide
  modified_base (19)..(19): 2'-OMe-nucleotide
  modified_base (20)..(20): 2'-fluoro-nucleotide
  modified_base (21)..(21): 2'-OMe-nucleotide
  modified_base (22)..(22): 2'-fluoro-nucleotide
  modified_base (23)..(23): Inverted nucleotide
ccacaaccugacacgauguccat

SEQ ID NO: 758 - DNA, 23 bp, Artificial Sequence
  source: /note="Description of Artificial Sequence: Synthetic oligonucleotide"
  source: /note="Description of Combined DNA/RNA Molecule: Synthetic oligonucleotide"
  modified_base (1)..(1): 2'-OMe-nucleotide
  modified_base (2)..(2): 2'-OMe-nucleotide
  modified_base (3)..(3): 2'-OMe-nucleotide
  modified_base (4)..(4): 2'-fluoro-nucleotide
  modified_base (5)..(5): 2'-OMe-nucleotide
  modified_base (6)..(6): 2'-fluoro-nucleotide
  modified_base (7)..(7): 2'-OMe-nucleotide
  modified_base (8)..(8): 2'-fluoro-nucleotide
  modified_base (9)..(9): 2'-OMe-nucleotide
  modified_base (10)..(10): 2'-fluoro-nucleotide
  modified_base (11)..(11): 2'-OMe-nucleotide
  modified_base (12)..(12): 2'-fluoro-nucleotide
  modified_base (13)..(13): 2'-OMe-nucleotide
  modified_base (14)..(14): 2'-fluoro-nucleotide
  modified_base (15)..(15): 2'-OMe-nucleotide
  modified_base (16)..(16): 2'-fluoro-nucleotide
  modified_base (17)..(17): 2'-OMe-nucleotide
  modified_base (18)..(18): 2'-fluoro-nucleotide
  modified_base (19)..(19): 2'-OMe-nucleotide
  modified_base (20)..(20): 2'-fluoro-nucleotide
  modified_base (21)..(21): 2'-OMe-nucleotide
  modified_base (22)..(22): 2'-fluoro-nucleotide
  modified_base (23)..(23): Inverted nucleotide
ccaaaccugacacgauguccagt

SEQ ID NO: 759 - DNA, 23 bp, Artificial Sequence
  source: /note="Description of Artificial Sequence: Synthetic oligonucleotide"
  source: /note="Description of Combined DNA/RNA Molecule: Synthetic oligonucleotide"
  modified_base (1)..(1): 2'-OMe-nucleotide
  modified_base (2)..(2): 2'-OMe-nucleotide
  modified_base (3)..(3): 2'-OMe-nucleotide
  modified_base (4)..(4): 2'-fluoro-nucleotide
  modified_base (5)..(5): 2'-OMe-nucleotide
  modified_base (6)..(6): 2'-fluoro-nucleotide
  modified_base (7)..(7): 2'-OMe-nucleotide
  modified_base (8)..(8): 2'-fluoro-nucleotide
  modified_base (9)..(9): 2'-OMe-nucleotide
  modified_base (10)..(10): 2'-fluoro-nucleotide
  modified_base (11)..(11): 2'-OMe-nucleotide
  modified_base (12)..(12): 2'-fluoro-nucleotide
  modified_base (13)..(13): 2'-OMe-nucleotide
  modified_base (14)..(14): 2'-fluoro-nucleotide
  modified_base (15)..(15): 2'-OMe-nucleotide
  modified_base (16)..(16): 2'-fluoro-nucleotide
  modified_base (17)..(17): 2'-OMe-nucleotide
  modified_base (18)..(18): 2'-fluoro-nucleotide
  modified_base (19)..(19): 2'-OMe-nucleotide
  modified_base (20)..(20): 2'-fluoro-nucleotide
  modified_base (21)..(21): 2'-OMe-nucleotide
  modified_base (22)..(22): 2'-fluoro-nucleotide
  modified_base (23)..(23): Inverted nucleotide
ccaccugacacgauguccagugt

SEQ ID NO: 760 - DNA, 23 bp, Artificial Sequence
  source: /note="Description of Artificial Sequence: Synthetic oligonucleotide"
  source: /note="Description of Combined DNA/RNA Molecule: Synthetic oligonucleotide"
  modified_base (1)..(1): 2'-OMe-nucleotide
  modified_base (2)..(2): 2'-OMe-nucleotide
  modified_base (3)..(3): 2'-OMe-nucleotide
  modified_base (4)..(4): 2'-fluoro-nucleotide
  modified_base (5)..(5): 2'-OMe-nucleotide
  modified_base (6)..(6): 2'-fluoro-nucleotide
  modified_base (7)..(7): 2'-OMe-nucleotide
  modified_base (8)..(8): 2'-fluoro-nucleotide
  modified_base (9)..(9): 2'-OMe-nucleotide
  modified_base (10)..(10): 2'-fluoro-nucleotide
  modified_base (11)..(11): 2'-OMe-nucleotide
  modified_base (12)..(12): 2'-fluoro-nucleotide
  modified_base (13)..(13): 2'-OMe-nucleotide
  modified_base (14)..(14): 2'-fluoro-nucleotide
  modified_base (15)..(15): 2'-OMe-nucleotide
  modified_base (16)..(16): 2'-fluoro-nucleotide
  modified_base (17)..(17): 2'-OMe-nucleotide
  modified_base (18)..(18): 2'-fluoro-nucleotide
  modified_base (19)..(19): 2'-OMe-nucleotide
  modified_base (20)..(20): 2'-fluoro-nucleotide
  modified_base (21)..(21): 2'-OMe-nucleotide
  modified_base (22)..(22): 2'-fluoro-nucleotide
  modified_base (23)..(23): Inverted nucleotide
ccacugacacgauguccagugat

SEQ ID NO: 761 - DNA, 23 bp, Artificial Sequence
  source: /note="Description of Artificial Sequence: Synthetic oligonucleotide"
  source: /note="Description of Combined DNA/RNA Molecule: Synthetic oligonucleotide"
  modified_base (1)..(1): 2'-OMe-nucleotide
  modified_base (2)..(2): 2'-OMe-nucleotide
  modified_base (3)..(3): 2'-OMe-nucleotide
  modified_base (4)..(4): 2'-fluoro-nucleotide
  modified_base (5)..(5): 2'-OMe-nucleotide
  modified_base (6)..(6): 2'-fluoro-nucleotide
  modified_base (7)..(7): 2'-OMe-nucleotide
  modified_base (8)..(8): 2'-fluoro-nucleotide
  modified_base (9)..(9): 2'-OMe-nucleotide
  modified_base (10)..(10): 2'-fluoro-nucleotide
  modified_base (11)..(11): 2'-OMe-nucleotide
  modified_base (12)..(12): 2'-fluoro-nucleotide
  modified_base (13)..(13): 2'-OMe-nucleotide
  modified_base (14)..(14): 2'-fluoro-nucleotide
  modified_base (15)..(15): 2'-OMe-nucleotide
  modified_base (16)..(16): 2'-fluoro-nucleotide
  modified_base (17)..(17): 2'-OMe-nucleotide
  modified_base (18)..(18): 2'-fluoro-nucleotide
  modified_base (19)..(19): 2'-OMe-nucleotide
  modified_base (20)..(20): 2'-fluoro-nucleotide
  modified_base (21)..(21): 2'-OMe-nucleotide
  modified_base (22)..(22): 2'-fluoro-nucleotide
  modified_base (23)..(23): Inverted nucleotide
ccaugacacgauguccagugact

SEQ ID NO: 762 - DNA, 23 bp, Artificial Sequence
  source: /note="Description of Artificial Sequence: Synthetic oligonucleotide"
  source: /note="Description of Combined DNA/RNA Molecule: Synthetic oligonucleotide"
  modified_base (1)..(1): 2'-OMe-nucleotide
  modified_base (2)..(2): 2'-OMe-nucleotide
  modified_base (3)..(3): 2'-OMe-nucleotide
  modified_base (4)..(4): 2'-fluoro-nucleotide
  modified_base (5)..(5): 2'-OMe-nucleotide
  modified_base (6)..(6): 2'-fluoro-nucleotide
  modified_base (7)..(7): 2'-OMe-nucleotide
  modified_base (8)..(8): 2'-fluoro-nucleotide
  modified_base (9)..(9): 2'-OMe-nucleotide
  modified_base (10)..(10): 2'-fluoro-nucleotide
  modified_base (11)..(11): 2'-OMe-nucleotide
  modified_base (12)..(12): 2'-fluoro-nucleotide
  modified_base (13)..(13): 2'-OMe-nucleotide
  modified_base (14)..(14): 2'-fluoro-nucleotide
  modified_base (15)..(15): 2'-OMe-nucleotide
  modified_base (16)..(16): 2'-fluoro-nucleotide
  modified_base (17)..(17): 2'-OMe-nucleotide
  modified_base (18)..(18): 2'-fluoro-nucleotide
  modified_base (19)..(19): 2'-OMe-nucleotide
  modified_base (20)..(20): 2'-fluoro-nucleotide
  modified_base (21)..(21): 2'-OMe-nucleotide
  modified_base (22)..(22): 2'-fluoro-nucleotide
  modified_base (23)..(23): Inverted nucleotide
ccagacacgauguccagugacat

SEQ ID NO: 763 - DNA, 23 bp, Artificial Sequence
  source: /note="Description of Artificial Sequence: Synthetic oligonucleotide"
  source: /note="Description of Combined DNA/RNA Molecule: Synthetic oligonucleotide"
  modified_base (1)..(1): 2'-OMe-nucleotide
  modified_base (2)..(2): 2'-OMe-nucleotide
  modified_base (3)..(3): 2'-OMe-nucleotide
  modified_base (4)..(4): 2'-fluoro-nucleotide
  modified_base (5)..(5): 2'-OMe-nucleotide
  modified_base (6)..(6): 2'-fluoro-nucleotide
  modified_base (7)..(7): 2'-OMe-nucleotide
  modified_base (8)..(8): 2'-fluoro-nucleotide
  modified_base (9)..(9): 2'-OMe-nucleotide
  modified_base (10)..(10): 2'-fluoro-nucleotide
  modified_base (11)..(11): 2'-OMe-nucleotide
  modified_base (12)..(12): 2'-fluoro-nucleotide
  modified_base (13)..(13): 2'-OMe-nucleotide
  modified_base (14)..(14): 2'-fluoro-nucleotide
  modified_base (15)..(15): 2'-OMe-nucleotide
  modified_base (16)..(16): 2'-fluoro-nucleotide
  modified_base (17)..(17): 2'-OMe-nucleotide
  modified_base (18)..(18): 2'-fluoro-nucleotide
  modified_base (19)..(19): 2'-OMe-nucleotide
  modified_base (20)..(20): 2'-fluoro-nucleotide
  modified_base (21)..(21): 2'-OMe-nucleotide
  modified_base (22)..(22): 2'-fluoro-nucleotide
  modified_base (23)..(23): Inverted nucleotide
ccaacacgauguccagugacagt

SEQ ID NO: 764 - DNA, 23 bp, Artificial Sequence
  source: /note="Description of Artificial Sequence: Synthetic oligonucleotide"
  source: /note="Description of Combined DNA/RNA Molecule: Synthetic oligonucleotide"
  modified_base (1)..(1): 2'-OMe-nucleotide
  modified_base (2)..(2): 2'-OMe-nucleotide
  modified_base (3)..(3): 2'-OMe-nucleotide
  modified_base (4)..(4): 2'-fluoro-nucleotide
  modified_base (5)..(5): 2'-OMe-nucleotide
  modified_base (6)..(6): 2'-fluoro-nucleotide
  modified_base (7)..(7): 2'-OMe-nucleotide
  modified_base (8)..(8): 2'-fluoro-nucleotide
  modified_base (9)..(9): 2'-OMe-nucleotide
  modified_base (10)..(10): 2'-fluoro-nucleotide
  modified_base (11)..(11): 2'-OMe-nucleotide
  modified_base (12)..(12): 2'-fluoro-nucleotide
  modified_base (13)..(13): 2'-OMe-nucleotide
  modified_base (14)..(14): 2'-fluoro-nucleotide
  modified_base (15)..(15): 2'-OMe-nucleotide
  modified_base (16)..(16): 2'-fluoro-nucleotide
  modified_base (17)..(17): 2'-OMe-nucleotide
  modified_base (18)..(18): 2'-fluoro-nucleotide
  modified_base (19)..(19): 2'-OMe-nucleotide
  modified_base (20)..(20): 2'-fluoro-nucleotide
  modified_base (21)..(21): 2'-OMe-nucleotide
  modified_base (22)..(22): 2'-fluoro-nucleotide
  modified_base (23)..(23): Inverted nucleotide
ccacgauguccagugacagaaut

SEQ ID NO: 765 - DNA, 23 bp, Artificial Sequence
  source: /note="Description of Artificial Sequence: Synthetic oligonucleotide"
  source: /note="Description of Combined DNA/RNA Molecule: Synthetic oligonucleotide"
  modified_base (1)..(1): 2'-OMe-nucleotide
  modified_base (2)..(2): 2'-OMe-nucleotide
  modified_base (3)..(3): 2'-OMe-nucleotide
  modified_base (4)..(4): 2'-fluoro-nucleotide
  modified_base (5)..(5): 2'-OMe-nucleotide
  modified_base (6)..(6): 2'-fluoro-nucleotide
  modified_base (7)..(7): 2'-OMe-nucleotide
  modified_base (8)..(8): 2'-fluoro-nucleotide
  modified_base (9)..(9): 2'-OMe-nucleotide
  modified_base (10)..(10): 2'-fluoro-nucleotide
  modified_base (11)..(11): 2'-OMe-nucleotide
  modified_base (12)..(12): 2'-fluoro-nucleotide
  modified_base (13)..(13): 2'-OMe-nucleotide
  modified_base (14)..(14): 2'-fluoro-nucleotide
  modified_base (15)..(15): 2'-OMe-nucleotide
  modified_base (16)..(16): 2'-fluoro-nucleotide
  modified_base (17)..(17): 2'-OMe-nucleotide
  modified_base (18)..(18): 2'-fluoro-nucleotide
  modified_base (19)..(19): 2'-OMe-nucleotide
  modified_base (20)..(20): 2'-fluoro-nucleotide
  modified_base (21)..(21): 2'-OMe-nucleotide
  modified_base (22)..(22): 2'-fluoro-nucleotide
  modified_base (23)..(23): Inverted nucleotide
ccagugauggacggaguuaucgt

SEQ ID NO: 766 - DNA, 23 bp, Artificial Sequence
  source: /note="Description of Artificial Sequence: Synthetic oligonucleotide"
  source: /note="Description of Combined DNA/RNA Molecule: Synthetic oligonucleotide"
  modified_base (1)..(1): 2'-OMe-nucleotide
  modified_base (2)..(2): 2'-OMe-nucleotide
  modified_base (3)..(3): 2'-OMe-nucleotide
  modified_base (4)..(4): 2'-fluoro-nucleotide
  modified_base (5)..(5): 2'-OMe-nucleotide
  modified_base (6)..(6): 2'-fluoro-nucleotide
  modified_base (7)..(7): 2'-OMe-nucleotide
  modified_base (8)..(8): 2'-fluoro-nucleotide
  modified_base (9)..(9): 2'-OMe-nucleotide
  modified_base (10)..(10): 2'-fluoro-nucleotide
  modified_base (11)..(11): 2'-OMe-nucleotide
  modified_base (12)..(12): 2'-fluoro-nucleotide
  modified_base (13)..(13): 2'-OMe-nucleotide
  modified_base (14)..(14): 2'-fluoro-nucleotide
  modified_base (15)..(15): 2'-OMe-nucleotide
  modified_base (16)..(16): 2'-fluoro-nucleotide
  modified_base (17)..(17): 2'-OMe-nucleotide
  modified_base (18)..(18): 2'-fluoro-nucleotide
  modified_base (19)..(19): 2'-OMe-nucleotide
  modified_base (20)..(20): 2'-fluoro-nucleotide
  modified_base (21)..(21): 2'-OMe-nucleotide
  modified_base (22)..(22): 2'-fluoro-nucleotide
  modified_base (23)..(23): Inverted nucleotide
ccaugauggacggaguuaucgat

SEQ ID NO: 767 - DNA, 23 bp, Artificial Sequence
  source: /note="Description of Artificial Sequence: Synthetic oligonucleotide"
  source: /note="Description of Combined DNA/RNA Molecule: Synthetic oligonucleotide"
  modified_base (1)..(1): 2'-OMe-nucleotide
  modified_base (2)..(2): 2'-OMe-nucleotide
  modified_base (3)..(3): 2'-OMe-nucleotide
  modified_base (4)..(4): 2'-fluoro-nucleotide
  modified_base (5)..(5): 2'-OMe-nucleotide
  modified_base (6)..(6): 2'-fluoro-nucleotide
  modified_base (7)..(7): 2'-OMe-nucleotide
  modified_base (8)..(8): 2'-fluoro-nucleotide
  modified_base (9)..(9): 2'-OMe-nucleotide
  modified_base (10)..(10): 2'-fluoro-nucleotide
  modified_base (11)..(11): 2'-OMe-nucleotide
  modified_base (12)..(12): 2'-fluoro-nucleotide
  modified_base (13)..(13): 2'-OMe-nucleotide
  modified_base (14)..(14): 2'-fluoro-nucleotide
  modified_base (15)..(15): 2'-OMe-nucleotide
  modified_base (16)..(16): 2'-fluoro-nucleotide
  modified_base (17)..(17): 2'-OMe-nucleotide
  modified_base (18)..(18): 2'-fluoro-nucleotide
  modified_base (19)..(19): 2'-OMe-nucleotide
  modified_base (20)..(20): 2'-fluoro-nucleotide
  modified_base (21)..(21): 2'-OMe-nucleotide
  modified_base (22)..(22): 2'-fluoro-nucleotide
  modified_base (23)..(23): Inverted nucleotide
ccagauggacggaguuaucgagt

SEQ ID NO: 768 - DNA, 23 bp, Artificial Sequence
  source: /note="Description of Artificial Sequence: Synthetic oligonucleotide"
  source: /note="Description of Combined DNA/RNA Molecule: Synthetic oligonucleotide"
  modified_base (1)..(1): 2'-OMe-nucleotide
  modified_base (2)..(2): 2'-OMe-nucleotide
  modified_base (3)..(3): 2'-OMe-nucleotide
  modified_base (4)..(4): 2'-fluoro-nucleotide
  modified_base (5)..(5): 2'-OMe-nucleotide
  modified_base (6)..(6): 2'-fluoro-nucleotide
  modified_base (7)..(7): 2'-OMe-nucleotide
  modified_base (8)..(8): 2'-fluoro-nucleotide
  modified_base (9)..(9): 2'-OMe-nucleotide
  modified_base (10)..(10): 2'-fluoro-nucleotide
  modified_base (11)..(11): 2'-OMe-nucleotide
  modified_base (12)..(12): 2'-fluoro-nucleotide
  modified_base (13)..(13): 2'-OMe-nucleotide
  modified_base (14)..(14): 2'-fluoro-nucleotide
  modified_base (15)..(15): 2'-OMe-nucleotide
  modified_base (16)..(16): 2'-fluoro-nucleotide
  modified_base (17)..(17): 2'-OMe-nucleotide
  modified_base (18)..(18): 2'-fluoro-nucleotide
  modified_base (19)..(19): 2'-OMe-nucleotide
  modified_base (20)..(20): 2'-fluoro-nucleotide
  modified_base (21)..(21): 2'-OMe-nucleotide
  modified_base (22)..(22): 2'-fluoro-nucleotide
  modified_base (23)..(23): Inverted nucleotide
ccaauggacggaguuaucgaggt

SEQ ID NO: 769 - DNA, 23 bp, Artificial Sequence
  source: /note="Description of Artificial Sequence: Synthetic oligonucleotide"
  source: /note="Description of Combined DNA/RNA Molecule: Synthetic oligonucleotide"
  modified_base (1)..(1): 2'-OMe-nucleotide
  modified_base (2)..(2): 2'-OMe-nucleotide
  modified_base (3)..(3): 2'-OMe-nucleotide
  modified_base (4)..(4): 2'-fluoro-nucleotide
  modified_base (5)..(5): 2'-OMe-nucleotide
  modified_base (6)..(6): 2'-fluoro-nucleotide
  modified_base (7)..(7): 2'-OMe-nucleotide
  modified_base (8)..(8): 2'-fluoro-nucleotide
  modified_base (9)..(9): 2'-OMe-nucleotide
  modified_base (10)..(10): 2'-fluoro-nucleotide
  modified_base (11)..(11): 2'-OMe-nucleotide
  modified_base (12)..(12): 2'-fluoro-nucleotide
  modified_base (13)..(13): 2'-OMe-nucleotide
  modified_base (14)..(14): 2'-fluoro-nucleotide
  modified_base (15)..(15): 2'-OMe-nucleotide
  modified_base (16)..(16): 2'-fluoro-nucleotide
  modified_base (17)..(17): 2'-OMe-nucleotide
  modified_base (18)..(18): 2'-fluoro-nucleotide
  modified_base (19)..(19): 2'-OMe-nucleotide
  modified_base (20)..(20): 2'-fluoro-nucleotide
  modified_base (21)..(21): 2'-OMe-nucleotide
  modified_base (22)..(22): 2'-fluoro-nucleotide
  modified_base (23)..(23): Inverted nucleotide
ccauggacggaguuaucgaggct

SEQ ID NO: 770 - DNA, 23 bp, Artificial Sequence
  source: /note="Description of Artificial Sequence: Synthetic oligonucleotide"
  source: /note="Description of Combined DNA/RNA Molecule: Synthetic oligonucleotide"
  modified_base (1)..(1): 2'-OMe-nucleotide
  modified_base (2)..(2): 2'-OMe-nucleotide
  modified_base (3)..(3): 2'-OMe-nucleotide
  modified_base (4)..(4): 2'-fluoro-nucleotide
  modified_base (5)..(5): 2'-OMe-nucleotide
  modified_base (6)..(6): 2'-fluoro-nucleotide
  modified_base (7)..(7): 2'-OMe-nucleotide
  modified_base (8)..(8): 2'-fluoro-nucleotide
  modified_base (9)..(9): 2'-OMe-nucleotide
  modified_base (10)..(10): 2'-fluoro-nucleotide
  modified_base (11)..(11): 2'-OMe-nucleotide
  modified_base (12)..(12): 2'-fluoro-nucleotide
  modified_base (13)..(13): 2'-OMe-nucleotide
  modified_base (14)..(14): 2'-fluoro-nucleotide
  modified_base (15)..(15): 2'-OMe-nucleotide
  modified_base (16)..(16): 2'-fluoro-nucleotide
  modified_base (17)..(17): 2'-OMe-nucleotide
  modified_base (18)..(18): 2'-fluoro-nucleotide
  modified_base (19)..(19): 2'-OMe-nucleotide
  modified_base (20)..(20): 2'-fluoro-nucleotide
  modified_base (21)..(21): 2'-OMe-nucleotide
  modified_base (22)..(22): 2'-fluoro-nucleotide
  modified_base (23)..(23): Inverted nucleotide
ccaggacggaguuaucgaggcat

SEQ ID NO: 771 - DNA, 23 bp, Artificial Sequence
  source: /note="Description of Artificial Sequence: Synthetic oligonucleotide"
  source: /note="Description of Combined DNA/RNA Molecule: Synthetic oligonucleotide"
  modified_base (1)..(1): 2'-OMe-nucleotide
  modified_base (2)..(2): 2'-OMe-nucleotide
  modified_base (3)..(3): 2'-OMe-nucleotide
  modified_base (4)..(4): 2'-fluoro-nucleotide
  modified_base (5)..(5): 2'-OMe-nucleotide
  modified_base (6)..(6): 2'-fluoro-nucleotide
  modified_base (7)..(7): 2'-OMe-nucleotide
  modified_base (8)..(8): 2'-fluoro-nucleotide
  modified_base (9)..(9): 2'-OMe-nucleotide
  modified_base (10)..(10): 2'-fluoro-nucleotide
  modified_base (11)..(11): 2'-OMe-nucleotide
  modified_base (12)..(12): 2'-fluoro-nucleotide
  modified_base (13)..(13): 2'-OMe-nucleotide
  modified_base (14)..(14): 2'-fluoro-nucleotide
  modified_base (15)..(15): 2'-OMe-nucleotide
  modified_base (16)..(16): 2'-fluoro-nucleotide
  modified_base (17)..(17): 2'-OMe-nucleotide
  modified_base (18)..(18): 2'-fluoro-nucleotide
  modified_base (19)..(19): 2'-OMe-nucleotide
  modified_base (20)..(20): 2'-fluoro-nucleotide
  modified_base (21)..(21): 2'-OMe-nucleotide
  modified_base (22)..(22): 2'-fluoro-nucleotide
  modified_base (23)..(23): Inverted nucleotide
ccagaguuaucgaggcauaucct

SEQ ID NO: 772 - DNA, 23 bp, Artificial Sequence
  source: /note="Description of Artificial Sequence: Synthetic oligonucleotide"
  source: /note="Description of Combined DNA/RNA Molecule: Synthetic oligonucleotide"
  modified_base (1)..(1): 2'-OMe-nucleotide
  modified_base (2)..(2): 2'-OMe-nucleotide
  modified_base (3)..(3): 2'-OMe-nucleotide
  modified_base (4)..(4): 2'-fluoro-nucleotide
  modified_base (5)..(5): 2'-OMe-nucleotide
  modified_base (6)..(6): 2'-fluoro-nucleotide
  modified_base (7)..(7): 2'-OMe-nucleotide
  modified_base (8)..(8): 2'-fluoro-nucleotide
  modified_base (9)..(9): 2'-OMe-nucleotide
  modified_base (10)..(10): 2'-fluoro-nucleotide
  modified_base (11)..(11): 2'-OMe-nucleotide
  modified_base (12)..(12): 2'-fluoro-nucleotide
  modified_base (13)..(13): 2'-OMe-nucleotide
  modified_base (14)..(14): 2'-fluoro-nucleotide
  modified_base (15)..(15): 2'-OMe-nucleotide
  modified_base (16)..(16): 2'-fluoro-nucleotide
  modified_base (17)..(17): 2'-OMe-nucleotide
  modified_base (18)..(18): 2'-fluoro-nucleotide
  modified_base (19)..(19): 2'-OMe-nucleotide
  modified_base (20)..(20): 2'-fluoro-nucleotide
  modified_base (21)..(21): 2'-OMe-nucleotide
  modified_base (22)..(22): 2'-fluoro-nucleotide
  modified_base (23)..(23): Inverted nucleotide
ccaaguuaucgaggcauauccut

SEQ ID NO: 773 - DNA, 23 bp, Artificial Sequence
  source: /note="Description of Artificial Sequence: Synthetic oligonucleotide"
  source: /note="Description of Combined DNA/RNA Molecule: Synthetic oligonucleotide"
  modified_base (1)..(1): 2'-OMe-nucleotide
  modified_base (2)..(2): 2'-OMe-nucleotide
  modified_base (3)..(3): 2'-OMe-nucleotide
  modified_base (4)..(4): 2'-fluoro-nucleotide
  modified_base (5)..(5): 2'-OMe-nucleotide
  modified_base (6)..(6): 2'-fluoro-nucleotide
  modified_base (7)..(7): 2'-OMe-nucleotide
  modified_base (8)..(8): 2'-fluoro-nucleotide
  modified_base (9)..(9): 2'-OMe-nucleotide
  modified_base (10)..(10): 2'-fluoro-nucleotide
  modified_base (11)..(11): 2'-OMe-nucleotide
  modified_base (12)..(12): 2'-fluoro-nucleotide
  modified_base (13)..(13): 2'-OMe-nucleotide
  modified_base (14)..(14): 2'-fluoro-nucleotide
  modified_base (15)..(15): 2'-OMe-nucleotide
  modified_base (16)..(16): 2'-fluoro-nucleotide
  modified_base (17)..(17): 2'-OMe-nucleotide
  modified_base (18)..(18): 2'-fluoro-nucleotide
  modified_base (19)..(19): 2'-OMe-nucleotide
  modified_base (20)..(20): 2'-fluoro-nucleotide
  modified_base (21)..(21): 2'-OMe-nucleotide
  modified_base (22)..(22): 2'-fluoro-nucleotide
  modified_base (23)..(23): Inverted nucleotide
ccaguuaucgaggcauauccuct

SEQ ID NO: 774 - DNA, 23 bp, Artificial Sequence
  source: /note="Description of Artificial Sequence: Synthetic oligonucleotide"
  source: /note="Description of Combined DNA/RNA Molecule: Synthetic oligonucleotide"
  modified_base (1)..(1): 2'-OMe-nucleotide
  modified_base (2)..(2): 2'-OMe-nucleotide
  modified_base (3)..(3): 2'-OMe-nucleotide
  modified_base (4)..(4): 2'-fluoro-nucleotide
  modified_base (5)..(5): 2'-OMe-nucleotide
  modified_base (6)..(6): 2'-fluoro-nucleotide
  modified_base (7)..(7): 2'-OMe-nucleotide
  modified_base (8)..(8): 2'-fluoro-nucleotide
  modified_base (9)..(9): 2'-OMe-nucleotide
  modified_base (10)..(10): 2'-fluoro-nucleotide
  modified_base (11)..(11): 2'-OMe-nucleotide
  modified_base (12)..(12): 2'-fluoro-nucleotide
  modified_base (13)..(13): 2'-OMe-nucleotide
  modified_base (14)..(14): 2'-fluoro-nucleotide
  modified_base (15)..(15): 2'-OMe-nucleotide
  modified_base (16)..(16): 2'-fluoro-nucleotide
  modified_base (17)..(17): 2'-OMe-nucleotide
  modified_base (18)..(18): 2'-fluoro-nucleotide
  modified_base (19)..(19): 2'-OMe-nucleotide
  modified_base (20)..(20): 2'-fluoro-nucleotide
  modified_base (21)..(21): 2'-OMe-nucleotide
  modified_base (22)..(22): 2'-fluoro-nucleotide
  modified_base (23)..(23): Inverted nucleotide
ccauuaucgaggcauauccucct

SEQ ID NO: 775 - DNA, 23 bp, Artificial Sequence
  source: /note="Description of Artificial Sequence: Synthetic oligonucleotide"
  source: /note="Description of Combined DNA/RNA Molecule: Synthetic oligonucleotide"
  modified_base (1)..(1): 2'-OMe-nucleotide
  modified_base (2)..(2): 2'-OMe-nucleotide
  modified_base (3)..(3): 2'-OMe-nucleotide
  modified_base (4)..(4): 2'-fluoro-nucleotide
  modified_base (5)..(5): 2'-OMe-nucleotide
  modified_base (6)..(6): 2'-fluoro-nucleotide
  modified_base (7)..(7): 2'-OMe-nucleotide
  modified_base (8)..(8): 2'-fluoro-nucleotide
  modified_base (9)..(9): 2'-OMe-nucleotide
  modified_base (10)..(10): 2'-fluoro-nucleotide
  modified_base (11)..(11): 2'-OMe-nucleotide
  modified_base (12)..(12): 2'-fluoro-nucleotide
  modified_base (13)..(13): 2'-OMe-nucleotide
  modified_base (14)..(14): 2'-fluoro-nucleotide
  modified_base (15)..(15): 2'-OMe-nucleotide
  modified_base (16)..(16): 2'-fluoro-nucleotide
  modified_base (17)..(17): 2'-OMe-nucleotide
  modified_base (18)..(18): 2'-fluoro-nucleotide
  modified_base (19)..(19): 2'-OMe-nucleotide
  modified_base (20)..(20): 2'-fluoro-nucleotide
  modified_base (21)..(21): 2'-OMe-nucleotide
  modified_base (22)..(22): 2'-fluoro-nucleotide
  modified_base (23)..(23): Inverted nucleotide
ccaggaaggaccugucaaucuut

SEQ ID NO: 776 - DNA, 23 bp, Artificial Sequence
  source: /note="Description of Artificial Sequence: Synthetic oligonucleotide"
  source: /note="Description of Combined DNA/RNA Molecule: Synthetic oligonucleotide"
  modified_base (1)..(1): 2'-OMe-nucleotide
  modified_base (2)..(2): 2'-OMe-nucleotide
  modified_base (3)..(3): 2'-OMe-nucleotide
  modified_base (4)..(4): 2'-fluoro-nucleotide
  modified_base (5)..(5): 2'-OMe-nucleotide
  modified_base (6)..(6): 2'-fluoro-nucleotide
  modified_base (7)..(7): 2'-OMe-nucleotide
  modified_base (8)..(8): 2'-fluoro-nucleotide
  modified_base (9)..(9): 2'-OMe-nucleotide
  modified_base (10)..(10): 2'-fluoro-nucleotide
  modified_base (11)..(11): 2'-OMe-nucleotide
  modified_base (12)..(12): 2'-fluoro-nucleotide
  modified_base (13)..(13): 2'-OMe-nucleotide
  modified_base (14)..(14): 2'-fluoro-nucleotide
  modified_base (15)..(15): 2'-OMe-nucleotide
  modified_base (16)..(16): 2'-fluoro-nucleotide
  modified_base (17)..(17): 2'-OMe-nucleotide
  modified_base (18)..(18): 2'-fluoro-nucleotide
  modified_base (19)..(19): 2'-OMe-nucleotide
  modified_base (20)..(20): 2'-fluoro-nucleotide
  modified_base (21)..(21): 2'-OMe-nucleotide
  modified_base (22)..(22): 2'-fluoro-nucleotide
  modified_base (23)..(23): Inverted nucleotide
ccaaaggaccugucaaucuuggt

SEQ ID NO: 777 - DNA, 23 bp, Artificial Sequence
  source: /note="Description of Artificial Sequence: Synthetic oligonucleotide"
  source: /note="Description of Combined DNA/RNA Molecule: Synthetic oligonucleotide"
  modified_base (1)..(1): 2'-OMe-nucleotide
  modified_base (2)..(2): 2'-OMe-nucleotide
  modified_base (3)..(3): 2'-OMe-nucleotide
  modified_base (4)..(4): 2'-fluoro-nucleotide
  modified_base (5)..(5): 2'-OMe-nucleotide
  modified_base (6)..(6): 2'-fluoro-nucleotide
  modified_base (7)..(7): 2'-OMe-nucleotide
  modified_base (8)..(8): 2'-fluoro-nucleotide
  modified_base (9)..(9): 2'-OMe-nucleotide
  modified_base (10)..(10): 2'-fluoro-nucleotide
  modified_base (11)..(11): 2'-OMe-nucleotide
  modified_base (12)..(12): 2'-fluoro-nucleotide
  modified_base (13)..(13): 2'-OMe-nucleotide
  modified_base (14)..(14): 2'-fluoro-nucleotide
  modified_base (15)..(15): 2'-OMe-nucleotide
  modified_base (16)..(16): 2'-fluoro-nucleotide
  modified_base (17)..(17): 2'-OMe-nucleotide
  modified_base (18)..(18): 2'-fluoro-nucleotide
  modified_base (19)..(19): 2'-OMe-nucleotide
  modified_base (20)..(20): 2'-fluoro-nucleotide
  modified_base (21)..(21): 2'-OMe-nucleotide
  modified_base (22)..(22): 2'-fluoro-nucleotide
  modified_base (23)..(23): Inverted nucleotide
ccaaggaccugucaaucuuggut

SEQ ID NO: 778 - DNA, 23 bp, Artificial Sequence
  source: /note="Description of Artificial Sequence: Synthetic oligonucleotide"
  source: /note="Description of Combined DNA/RNA Molecule: Synthetic oligonucleotide"
  modified_base (1)..(1): 2'-OMe-nucleotide
  modified_base (2)..(2): 2'-OMe-nucleotide
  modified_base (3)..(3): 2'-OMe-nucleotide
  modified_base (4)..(4): 2'-fluoro-nucleotide
  modified_base (5)..(5): 2'-OMe-nucleotide
  modified_base (6)..(6): 2'-fluoro-nucleotide
  modified_base (7)..(7): 2'-OMe-nucleotide
  modified_base (8)..(8): 2'-fluoro-nucleotide
  modified_base (9)..(9): 2'-OMe-nucleotide
  modified_base (10)..(10): 2'-fluoro-nucleotide
  modified_base (11)..(11): 2'-OMe-nucleotide
  modified_base (12)..(12): 2'-fluoro-nucleotide
  modified_base (13)..(13): 2'-OMe-nucleotide
  modified_base (14)..(14): 2'-fluoro-nucleotide
  modified_base (15)..(15): 2'-OMe-nucleotide
  modified_base (16)..(16): 2'-fluoro-nucleotide
  modified_base (17)..(17): 2'-OMe-nucleotide
  modified_base (18)..(18): 2'-fluoro-nucleotide
  modified_base (19)..(19): 2'-OMe-nucleotide
  modified_base (20)..(20): 2'-fluoro-nucleotide
  modified_base (21)..(21): 2'-OMe-nucleotide
  modified_base (22)..(22): 2'-fluoro-nucleotide
  modified_base (23)..(23): Inverted nucleotide
ccaggaccugucaaucuugguct

SEQ ID NO: 779 - DNA, 23 bp, Artificial Sequence
  source: /note="Description of Artificial Sequence: Synthetic oligonucleotide"
  source: /note="Description of Combined DNA/RNA Molecule: Synthetic oligonucleotide"
  modified_base (1)..(1): 2'-OMe-nucleotide
  modified_base (2)..(2): 2'-OMe-nucleotide
  modified_base (3)..(3): 2'-OMe-nucleotide
  modified_base (4)..(4): 2'-fluoro-nucleotide
  modified_base (5)..(5): 2'-OMe-nucleotide
  modified_base (6)..(6): 2'-fluoro-nucleotide
  modified_base (7)..(7): 2'-OMe-nucleotide
  modified_base (8)..(8): 2'-fluoro-nucleotide
  modified_base (9)..(9): 2'-OMe-nucleotide
  modified_base (10)..(10): 2'-fluoro-nucleotide
  modified_base (11)..(11): 2'-OMe-nucleotide
  modified_base (12)..(12): 2'-fluoro-nucleotide
  modified_base (13)..(13): 2'-OMe-nucleotide
  modified_base (14)..(14): 2'-fluoro-nucleotide
  modified_base (15)..(15): 2'-OMe-nucleotide
  modified_base (16)..(16): 2'-fluoro-nucleotide
  modified_base (17)..(17): 2'-OMe-nucleotide
  modified_base (18)..(18): 2'-fluoro-nucleotide
  modified_base (19)..(19): 2'-OMe-nucleotide
  modified_base (20)..(20): 2'-fluoro-nucleotide
  modified_base (21)..(21): 2'-OMe-nucleotide
  modified_base (22)..(22): 2'-fluoro-nucleotide
  modified_base (23)..(23): Inverted nucleotide
ccaggccugaccgagaacuacut

SEQ ID NO: 780 - DNA, 23 bp, Artificial Sequence
  source: /note="Description of Artificial Sequence: Synthetic oligonucleotide"
  source: /note="Description of Combined DNA/RNA Molecule: Synthetic oligonucleotide"
  modified_base (1)..(1): 2'-OMe-nucleotide
  modified_base (2)..(2): 2'-OMe-nucleotide
  modified_base (3)..(3): 2'-OMe-nucleotide
  modified_base (4)..(4): 2'-fluoro-nucleotide
  modified_base (5)..(5): 2'-OMe-nucleotide
  modified_base (6)..(6): 2'-fluoro-nucleotide
  modified_base (7)..(7): 2'-OMe-nucleotide
  modified_base (8)..(8): 2'-fluoro-nucleotide
  modified_base (9)..(9): 2'-OMe-nucleotide
  modified_base (10)..(10): 2'-fluoro-nucleotide
  modified_base (11)..(11): 2'-OMe-nucleotide
  modified_base (12)..(12): 2'-fluoro-nucleotide
  modified_base (13)..(13): 2'-OMe-nucleotide
  modified_base (14)..(14): 2'-fluoro-nucleotide
  modified_base (15)..(15): 2'-OMe-nucleotide
  modified_base (16)..(16): 2'-fluoro-nucleotide
  modified_base (17)..(17): 2'-OMe-nucleotide
  modified_base (18)..(18): 2'-fluoro-nucleotide
  modified_base (19)..(19): 2'-OMe-nucleotide
  modified_base (20)..(20): 2'-fluoro-nucleotide
  modified_base (21)..(21): 2'-OMe-nucleotide
  modified_base (22)..(22): 2'-fluoro-nucleotide
  modified_base (23)..(23): Inverted nucleotide
ccaccugaccgagaacuacugct

SEQ ID NO: 781 - DNA, 23 bp, Artificial Sequence
  source: /note="Description of Artificial Sequence: Synthetic oligonucleotide"
  source: /note="Description of Combined DNA/RNA Molecule: Synthetic oligonucleotide"
  modified_base (1)..(1): 2'-OMe-nucleotide
  modified_base (2)..(2): 2'-OMe-nucleotide
  modified_base (3)..(3): 2'-OMe-nucleotide
  modified_base (4)..(4): 2'-fluoro-nucleotide
  modified_base (5)..(5): 2'-OMe-nucleotide
  modified_base (6)..(6): 2'-fluoro-nucleotide
  modified_base (7)..(7): 2'-OMe-nucleotide
  modified_base (8)..(8): 2'-fluoro-nucleotide
  modified_base (9)..(9): 2'-OMe-nucleotide
  modified_base (10)..(10): 2'-fluoro-nucleotide
  modified_base (11)..(11): 2'-OMe-nucleotide
  modified_base (12)..(12): 2'-fluoro-nucleotide
  modified_base (13)..(13): 2'-OMe-nucleotide
  modified_base (14)..(14): 2'-fluoro-nucleotide
  modified_base (15)..(15): 2'-OMe-nucleotide
  modified_base (16)..(16): 2'-fluoro-nucleotide
  modified_base (17)..(17): 2'-OMe-nucleotide
  modified_base (18)..(18): 2'-fluoro-nucleotide
  modified_base (19)..(19): 2'-OMe-nucleotide
  modified_base (20)..(20): 2'-fluoro-nucleotide
  modified_base (21)..(21): 2'-OMe-nucleotide
  modified_base (22)..(22): 2'-fluoro-nucleotide
  modified_base (23)..(23): Inverted nucleotide
ccacugaccgagaacuacugcat

SEQ ID NO: 782 - DNA, 23 bp, Artificial Sequence
  source: /note="Description of Artificial Sequence: Synthetic oligonucleotide"
  source: /note="Description of Combined DNA/RNA Molecule: Synthetic oligonucleotide"
  modified_base (1)..(1): 2'-OMe-nucleotide
  modified_base (2)..(2): 2'-OMe-nucleotide
  modified_base (3)..(3): 2'-OMe-nucleotide
  modified_base (4)..(4): 2'-fluoro-nucleotide
  modified_base (5)..(5): 2'-OMe-nucleotide
  modified_base (6)..(6): 2'-fluoro-nucleotide
  modified_base (7)..(7): 2'-OMe-nucleotide
  modified_base (8)..(8): 2'-fluoro-nucleotide
  modified_base (9)..(9): 2'-OMe-nucleotide
  modified_base (10)..(10): 2'-fluoro-nucleotide
  modified_base (11)..(11): 2'-OMe-nucleotide
  modified_base (12)..(12): 2'-fluoro-nucleotide
  modified_base (13)..(13): 2'-OMe-nucleotide
  modified_base (14)..(14): 2'-fluoro-nucleotide
  modified_base (15)..(15): 2'-OMe-nucleotide
  modified_base (16)..(16): 2'-fluoro-nucleotide
  modified_base (17)..(17): 2'-OMe-nucleotide
  modified_base (18)..(18): 2'-fluoro-nucleotide
  modified_base (19)..(19): 2'-OMe-nucleotide
  modified_base (20)..(20): 2'-fluoro-nucleotide
  modified_base (21)..(21): 2'-OMe-nucleotide
  modified_base (22)..(22): 2'-fluoro-nucleotide
  modified_base (23)..(23): Inverted nucleotide
ccaugaccgagaacuacugcagt

SEQ ID NO: 783 - DNA, 23 bp, Artificial Sequence
  source: /note="Description of Artificial Sequence: Synthetic oligonucleotide"
  source: /note="Description of Combined DNA/RNA Molecule: Synthetic oligonucleotide"
  modified_base (1)..(1): 2'-OMe-nucleotide
  modified_base (2)..(2): 2'-OMe-nucleotide
  modified_base (3)..(3): 2'-OMe-nucleotide
  modified_base (4)..(4): 2'-fluoro-nucleotide
  modified_base (5)..(5): 2'-OMe-nucleotide
  modified_base (6)..(6): 2'-fluoro-nucleotide
  modified_base (7)..(7): 2'-OMe-nucleotide
  modified_base (8)..(8): 2'-fluoro-nucleotide
  modified_base (9)..(9): 2'-OMe-nucleotide
  modified_base (10)..(10): 2'-fluoro-nucleotide
  modified_base (11)..(11): 2'-OMe-nucleotide
  modified_base (12)..(12): 2'-fluoro-nucleotide
  modified_base (13)..(13): 2'-OMe-nucleotide
  modified_base (14)..(14): 2'-fluoro-nucleotide
  modified_base (15)..(15): 2'-OMe-nucleotide
  modified_base (16)..(16): 2'-fluoro-nucleotide
  modified_base (17)..(17): 2'-OMe-nucleotide
  modified_base (18)..(18): 2'-fluoro-nucleotide
  modified_base (19)..(19): 2'-OMe-nucleotide
  modified_base (20)..(20): 2'-fluoro-nucleotide
  modified_base (21)..(21): 2'-OMe-nucleotide
  modified_base (22)..(22): 2'-fluoro-nucleotide
  modified_base (23)..(23): Inverted nucleotide
ccaggaauccagauucugggaat

SEQ ID NO: 784 - DNA, 23 bp, Artificial Sequence
  source: /note="Description of Artificial Sequence: Synthetic oligonucleotide"
  source: /note="Description of Combined DNA/RNA Molecule: Synthetic oligonucleotide"
  modified_base (1)..(1): 2'-OMe-nucleotide
  modified_base (2)..(2): 2'-OMe-nucleotide
  modified_base (3)..(3): 2'-OMe-nucleotide
  modified_base (4)..(4): 2'-fluoro-nucleotide
  modified_base (5)..(5): 2'-OMe-nucleotide
  modified_base (6)..(6): 2'-fluoro-nucleotide
  modified_base (7)..(7): 2'-OMe-nucleotide
  modified_base (8)..(8): 2'-fluoro-nucleotide
  modified_base (9)..(9): 2'-OMe-nucleotide
  modified_base (10)..(10): 2'-fluoro-nucleotide
  modified_base (11)..(11): 2'-OMe-nucleotide
  modified_base (12)..(12): 2'-fluoro-nucleotide
  modified_base (13)..(13): 2'-OMe-nucleotide
  modified_base (14)..(14): 2'-fluoro-nucleotide
  modified_base (15)..(15): 2'-OMe-nucleotide
  modified_base (16)..(16): 2'-fluoro-nucleotide
  modified_base (17)..(17): 2'-OMe-nucleotide
  modified_base (18)..(18): 2'-fluoro-nucleotide
  modified_base (19)..(19): 2'-OMe-nucleotide
  modified_base (20)..(20): 2'-fluoro-nucleotide
  modified_base (21)..(21): 2'-OMe-nucleotide
  modified_base (22)..(22): 2'-fluoro-nucleotide
  modified_base (23)..(23): Inverted nucleotide
ccaaauccagauucugggaaact

SEQ ID NO: 785 - DNA, 23 bp, Artificial Sequence
  source: /note="Description of Artificial Sequence: Synthetic oligonucleotide"
  source: /note="Description of Combined DNA/RNA Molecule: Synthetic oligonucleotide"
  modified_base (1)..(1): 2'-OMe-nucleotide
  modified_base (2)..(2): 2'-OMe-nucleotide
  modified_base (3)..(3): 2'-OMe-nucleotide
  modified_base (4)..(4): 2'-fluoro-nucleotide
  modified_base (5)..(5): 2'-OMe-nucleotide
  modified_base (6)..(6): 2'-fluoro-nucleotide
  modified_base (7)..(7): 2'-OMe-nucleotide
  modified_base (8)..(8): 2'-fluoro-nucleotide
  modified_base (9)..(9): 2'-OMe-nucleotide
  modified_base (10)..(10): 2'-fluoro-nucleotide
  modified_base (11)..(11): 2'-OMe-nucleotide
  modified_base (12)..(12): 2'-fluoro-nucleotide
  modified_base (13)..(13): 2'-OMe-nucleotide
  modified_base (14)..(14): 2'-fluoro-nucleotide
  modified_base (15)..(15): 2'-OMe-nucleotide
  modified_base (16)..(16): 2'-fluoro-nucleotide
  modified_base (17)..(17): 2'-OMe-nucleotide
  modified_base (18)..(18): 2'-fluoro-nucleotide
  modified_base (19)..(19): 2'-OMe-nucleotide
  modified_base (20)..(20): 2'-fluoro-nucleotide
  modified_base (21)..(21): 2'-OMe-nucleotide
  modified_base (22)..(22): 2'-fluoro-nucleotide
  modified_base (23)..(23): Inverted nucleotide
ccaucugggaaacaacccuggut

SEQ ID NO: 786 - DNA, 23 bp, Artificial Sequence
  source: /note="Description of Artificial Sequence: Synthetic oligonucleotide"
  source: /note="Description of Combined DNA/RNA Molecule: Synthetic oligonucleotide"
  modified_base (1)..(1): 2'-OMe-nucleotide
  modified_base (2)..(2): 2'-OMe-nucleotide
  modified_base (3)..(3): 2'-OMe-nucleotide
  modified_base (4)..(4): 2'-fluoro-nucleotide
  modified_base (5)..(5): 2'-OMe-nucleotide
  modified_base (6)..(6): 2'-fluoro-nucleotide
  modified_base (7)..(7): 2'-OMe-nucleotide
  modified_base (8)..(8): 2'-fluoro-nucleotide
  modified_base (9)..(9): 2'-OMe-nucleotide
  modified_base (10)..(10): 2'-fluoro-nucleotide
  modified_base (11)..(11): 2'-OMe-nucleotide
  modified_base (12)..(12): 2'-fluoro-nucleotide
  modified_base (13)..(13): 2'-OMe-nucleotide
  modified_base (14)..(14): 2'-fluoro-nucleotide
  modified_base (15)..(15): 2'-OMe-nucleotide
  modified_base (16)..(16): 2'-fluoro-nucleotide
  modified_base (17)..(17): 2'-OMe-nucleotide
  modified_base (18)..(18): 2'-fluoro-nucleotide
  modified_base (19)..(19): 2'-OMe-nucleotide
  modified_base (20)..(20): 2'-fluoro-nucleotide
  modified_base (21)..(21): 2'-OMe-nucleotide
  modified_base (22)..(22): 2'-fluoro-nucleotide
  modified_base (23)..(23): Inverted nucleotide
ccacugggaaacaacccuggugt

SEQ ID NO: 787 - DNA, 23 bp, Artificial Sequence
  source: /note="Description of Artificial Sequence: Synthetic oligonucleotide"
  source: /note="Description of Combined DNA/RNA Molecule: Synthetic oligonucleotide"
  modified_base (1)..(1): 2'-OMe-nucleotide
  modified_base (2)..(2): 2'-OMe-nucleotide
  modified_base (3)..(3): 2'-OMe-nucleotide
  modified_base (4)..(4): 2'-fluoro-nucleotide
  modified_base (5)..(5): 2'-OMe-nucleotide
  modified_base (6)..(6): 2'-fluoro-nucleotide
  modified_base (7)..(7): 2'-OMe-nucleotide
  modified_base (8)..(8): 2'-fluoro-nucleotide
  modified_base (9)..(9): 2'-OMe-nucleotide
  modified_base (10)..(10): 2'-fluoro-nucleotide
  modified_base (11)..(11): 2'-OMe-nucleotide
  modified_base (12)..(12): 2'-fluoro-nucleotide
  modified_base (13)..(13): 2'-OMe-nucleotide
  modified_base (14)..(14): 2'-fluoro-nucleotide
  modified_base (15)..(15): 2'-OMe-nucleotide
  modified_base (16)..(16): 2'-fluoro-nucleotide
  modified_base (17)..(17): 2'-OMe-nucleotide
  modified_base (18)..(18): 2'-fluoro-nucleotide
  modified_base (19)..(19): 2'-OMe-nucleotide
  modified_base (20)..(20): 2'-fluoro-nucleotide
  modified_base (21)..(21): 2'-OMe-nucleotide
  modified_base (22)..(22): 2'-fluoro-nucleotide
  modified_base (23)..(23): Inverted nucleotide
ccagggaaacaacccugguguut

SEQ ID NO: 788 - DNA, 23 bp, Artificial Sequence
  source: /note="Description of Artificial Sequence: Synthetic oligonucleotide"
  source: /note="Description of Combined DNA/RNA Molecule: Synthetic oligonucleotide"
  modified_base (1)..(1): 2'-OMe-nucleotide
  modified_base (2)..(2): 2'-OMe-nucleotide
  modified_base (3)..(3): 2'-OMe-nucleotide
  modified_base (4)..(4): 2'-fluoro-nucleotide
  modified_base (5)..(5): 2'-OMe-nucleotide
  modified_base (6)..(6): 2'-fluoro-nucleotide
  modified_base (7)..(7): 2'-OMe-nucleotide
  modified_base (8)..(8): 2'-fluoro-nucleotide
  modified_base (9)..(9): 2'-OMe-nucleotide
  modified_base (10)..(10): 2'-fluoro-nucleotide
  modified_base (11)..(11): 2'-OMe-nucleotide
  modified_base (12)..(12): 2'-fluoro-nucleotide
  modified_base (13)..(13): 2'-OMe-nucleotide
  modified_base (14)..(14): 2'-fluoro-nucleotide
  modified_base (15)..(15): 2'-OMe-nucleotide
  modified_base (16)..(16): 2'-fluoro-nucleotide
  modified_base (17)..(17): 2'-OMe-nucleotide
  modified_base (18)..(18): 2'-fluoro-nucleotide
  modified_base (19)..(19): 2'-OMe-nucleotide
  modified_base (20)..(20): 2'-fluoro-nucleotide
  modified_base (21)..(21): 2'-OMe-nucleotide
  modified_base (22)..(22): 2'-fluoro-nucleotide
  modified_base (23)..(23): Inverted nucleotide
ccagaaacaacccugguguuact

SEQ ID NO: 789 - DNA, 23 bp, Artificial Sequence
  source: /note="Description of Artificial Sequence: Synthetic oligonucleotide"
  source: /note="Description of Combined DNA/RNA Molecule: Synthetic oligonucleotide"
  modified_base (1)..(1): 2'-OMe-nucleotide
  modified_base (2)..(2): 2'-OMe-nucleotide
  modified_base (3)..(3): 2'-OMe-nucleotide
  modified_base (4)..(4): 2'-fluoro-nucleotide
  modified_base (5)..(5): 2'-OMe-nucleotide
  modified_base (6)..(6): 2'-fluoro-nucleotide
  modified_base (7)..(7): 2'-OMe-nucleotide
  modified_base (8)..(8): 2'-fluoro-nucleotide
  modified_base (9)..(9): 2'-OMe-nucleotide
  modified_base (10)..(10): 2'-fluoro-nucleotide
  modified_base (11)..(11): 2'-OMe-nucleotide
  modified_base (12)..(12): 2'-fluoro-nucleotide
  modified_base (13)..(13): 2'-OMe-nucleotide
  modified_base (14)..(14): 2'-fluoro-nucleotide
  modified_base (15)..(15): 2'-OMe-nucleotide
  modified_base (16)..(16): 2'-fluoro-nucleotide
  modified_base (17)..(17): 2'-OMe-nucleotide
  modified_base (18)..(18): 2'-fluoro-nucleotide
  modified_base (19)..(19): 2'-OMe-nucleotide
  modified_base (20)..(20): 2'-fluoro-nucleotide
  modified_base (21)..(21): 2'-OMe-nucleotide
  modified_base (22)..(22): 2'-fluoro-nucleotide
  modified_base (23)..(23): Inverted nucleotide
ccaaaacaacccugguguuacat

SEQ ID NO: 790 - DNA, 23 bp, Artificial Sequence
  source: /note="Description of Artificial Sequence: Synthetic oligonucleotide"
  source: /note="Description of Combined DNA/RNA Molecule: Synthetic oligonucleotide"
  modified_base (1)..(1): 2'-OMe-nucleotide
  modified_base (2)..(2): 2'-OMe-nucleotide
  modified_base (3)..(3): 2'-OMe-nucleotide
  modified_base (4)..(4): 2'-fluoro-nucleotide
  modified_base (5)..(5): 2'-OMe-nucleotide
  modified_base (6)..(6): 2'-fluoro-nucleotide
  modified_base (7)..(7): 2'-OMe-nucleotide
  modified_base (8)..(8): 2'-fluoro-nucleotide
  modified_base (9)..(9): 2'-OMe-nucleotide
  modified_base (10)..(10): 2'-fluoro-nucleotide
  modified_base (11)..(11): 2'-OMe-nucleotide
  modified_base (12)..(12): 2'-fluoro-nucleotide
  modified_base (13)..(13): 2'-OMe-nucleotide
  modified_base (14)..(14): 2'-fluoro-nucleotide
  modified_base (15)..(15): 2'-OMe-nucleotide
  modified_base (16)..(16): 2'-fluoro-nucleotide
  modified_base (17)..(17): 2'-OMe-nucleotide
  modified_base (18)..(18): 2'-fluoro-nucleotide
  modified_base (19)..(19): 2'-OMe-nucleotide
  modified_base (20)..(20): 2'-fluoro-nucleotide
  modified_base (21)..(21): 2'-OMe-nucleotide
  modified_base (22)..(22): 2'-fluoro-nucleotide
  modified_base (23)..(23): Inverted nucleotide
ccaaacaacccugguguuacact

SEQ ID NO: 791 - DNA, 23 bp, Artificial Sequence
  source: /note="Description of Artificial Sequence: Synthetic oligonucleotide"
  source: /note="Description of Combined DNA/RNA Molecule: Synthetic oligonucleotide"
  modified_base (1)..(1): 2'-OMe-nucleotide
  modified_base (2)..(2): 2'-OMe-nucleotide
  modified_base (3)..(3): 2'-OMe-nucleotide
  modified_base (4)..(4): 2'-fluoro-nucleotide
  modified_base (5)..(5): 2'-OMe-nucleotide
  modified_base (6)..(6): 2'-fluoro-nucleotide
  modified_base (7)..(7): 2'-OMe-nucleotide
  modified_base (8)..(8): 2'-fluoro-nucleotide
  modified_base (9)..(9): 2'-OMe-nucleotide
  modified_base (10)..(10): 2'-fluoro-nucleotide
  modified_base (11)..(11): 2'-OMe-nucleotide
  modified_base (12)..(12): 2'-fluoro-nucleotide
  modified_base (13)..(13): 2'-OMe-nucleotide
  modified_base (14)..(14): 2'-fluoro-nucleotide
  modified_base (15)..(15): 2'-OMe-nucleotide
  modified_base (16)..(16): 2'-fluoro-nucleotide
  modified_base (17)..(17): 2'-OMe-nucleotide
  modified_base (18)..(18): 2'-fluoro-nucleotide
  modified_base (19)..(19): 2'-OMe-nucleotide
  modified_base (20)..(20): 2'-fluoro-nucleotide
  modified_base (21)..(21): 2'-OMe-nucleotide
  modified_base (22)..(22): 2'-fluoro-nucleotide
  modified_base (23)..(23): Inverted nucleotide
ccaacaacccugguguuacacat

SEQ ID NO: 792 - DNA, 23 bp, Artificial Sequence
  source: /note="Description of Artificial Sequence: Synthetic oligonucleotide"
  source: /note="Description of Combined DNA/RNA Molecule: Synthetic oligonucleotide"
  modified_base (1)..(1): 2'-OMe-nucleotide
  modified_base (2)..(2): 2'-OMe-nucleotide
  modified_base (3)..(3): 2'-OMe-nucleotide
  modified_base (4)..(4): 2'-fluoro-nucleotide
  modified_base (5)..(5): 2'-OMe-nucleotide
  modified_base (6)..(6): 2'-fluoro-nucleotide
  modified_base (7)..(7): 2'-OMe-nucleotide
  modified_base (8)..(8): 2'-fluoro-nucleotide
  modified_base (9)..(9): 2'-OMe-nucleotide
  modified_base (10)..(10): 2'-fluoro-nucleotide
  modified_base (11)..(11): 2'-OMe-nucleotide
  modified_base (12)..(12): 2'-fluoro-nucleotide
  modified_base (13)..(13): 2'-OMe-nucleotide
  modified_base (14)..(14): 2'-fluoro-nucleotide
  modified_base (15)..(15): 2'-OMe-nucleotide
  modified_base (16)..(16): 2'-fluoro-nucleotide
  modified_base (17)..(17): 2'-OMe-nucleotide
  modified_base (18)..(18): 2'-fluoro-nucleotide
  modified_base (19)..(19): 2'-OMe-nucleotide
  modified_base (20)..(20): 2'-fluoro-nucleotide
  modified_base (21)..(21): 2'-OMe-nucleotide
  modified_base (22)..(22): 2'-fluoro-nucleotide
  modified_base (23)..(23): Inverted nucleotide
ccacaacccugguguuacacaat

SEQ ID NO: 793 - DNA, 23 bp, Artificial Sequence
  source: /note="Description of Artificial Sequence: Synthetic oligonucleotide"
  source: /note="Description of Combined DNA/RNA Molecule: Synthetic oligonucleotide"
  modified_base (1)..(1): 2'-OMe-nucleotide
  modified_base (2)..(2): 2'-OMe-nucleotide
  modified_base (3)..(3): 2'-OMe-nucleotide
  modified_base (4)..(4): 2'-fluoro-nucleotide
  modified_base (5)..(5): 2'-OMe-nucleotide
  modified_base (6)..(6): 2'-fluoro-nucleotide
  modified_base (7)..(7): 2'-OMe-nucleotide
  modified_base (8)..(8): 2'-fluoro-nucleotide
  modified_base (9)..(9): 2'-OMe-nucleotide
  modified_base (10)..(10): 2'-fluoro-nucleotide
  modified_base (11)..(11): 2'-OMe-nucleotide
  modified_base (12)..(12): 2'-fluoro-nucleotide
  modified_base (13)..(13): 2'-OMe-nucleotide
  modified_base (14)..(14): 2'-fluoro-nucleotide
  modified_base (15)..(15): 2'-OMe-nucleotide
  modified_base (16)..(16): 2'-fluoro-nucleotide
  modified_base (17)..(17): 2'-OMe-nucleotide
  modified_base (18)..(18): 2'-fluoro-nucleotide
  modified_base (19)..(19): 2'-OMe-nucleotide
  modified_base (20)..(20): 2'-fluoro-nucleotide
  modified_base (21)..(21): 2'-OMe-nucleotide
  modified_base (22)..(22): 2'-fluoro-nucleotide
  modified_base (23)..(23): Inverted nucleotide
ccaaacccugguguuacacaact

SEQ ID NO: 794 - DNA, 23 bp, Artificial Sequence
  source: /note="Description of Artificial Sequence: Synthetic oligonucleotide"
  source: /note="Description of Combined DNA/RNA Molecule: Synthetic oligonucleotide"
  modified_base (1)..(1): 2'-OMe-nucleotide
  modified_base (2)..(2): 2'-OMe-nucleotide
  modified_base (3)..(3): 2'-OMe-nucleotide
  modified_base (4)..(4): 2'-fluoro-nucleotide
  modified_base (5)..(5): 2'-OMe-nucleotide
  modified_base (6)..(6): 2'-fluoro-nucleotide
  modified_base (7)..(7): 2'-OMe-nucleotide
  modified_base (8)..(8): 2'-fluoro-nucleotide
  modified_base (9)..(9): 2'-OMe-nucleotide
  modified_base (10)..(10): 2'-fluoro-nucleotide
  modified_base (11)..(11): 2'-OMe-nucleotide
  modified_base (12)..(12): 2'-fluoro-nucleotide
  modified_base (13)..(13): 2'-OMe-nucleotide
  modified_base (14)..(14): 2'-fluoro-nucleotide
  modified_base (15)..(15): 2'-OMe-nucleotide
  modified_base (16)..(16): 2'-fluoro-nucleotide
  modified_base (17)..(17): 2'-OMe-nucleotide
  modified_base (18)..(18): 2'-fluoro-nucleotide
  modified_base (19)..(19): 2'-OMe-nucleotide
  modified_base (20)..(20): 2'-fluoro-nucleotide
  modified_base (21)..(21): 2'-OMe-nucleotide
  modified_base (22)..(22): 2'-fluoro-nucleotide
  modified_base (23)..(23): Inverted nucleotide
ccacgugugugaggugggaguat

SEQ ID NO: 795 - DNA, 23 bp, Artificial Sequence
  source: /note="Description of Artificial Sequence: Synthetic oligonucleotide"
  source: /note="Description of Combined DNA/RNA Molecule: Synthetic oligonucleotide"
  modified_base (1)..(1): 2'-OMe-nucleotide
  modified_base (2)..(2): 2'-OMe-nucleotide
  modified_base (3)..(3): 2'-OMe-nucleotide
  modified_base (4)..(4): 2'-fluoro-nucleotide
  modified_base (5)..(5): 2'-OMe-nucleotide
  modified_base (6)..(6): 2'-fluoro-nucleotide
  modified_base (7)..(7): 2'-OMe-nucleotide
  modified_base (8)..(8): 2'-fluoro-nucleotide
  modified_base (9)..(9): 2'-OMe-nucleotide
  modified_base (10)..(10): 2'-fluoro-nucleotide
  modified_base (11)..(11): 2'-OMe-nucleotide
  modified_base (12)..(12): 2'-fluoro-nucleotide
  modified_base (13)..(13): 2'-OMe-nucleotide
  modified_base (14)..(14): 2'-fluoro-nucleotide
  modified_base (15)..(15): 2'-OMe-nucleotide
  modified_base (16)..(16): 2'-fluoro-nucleotide
  modified_base (17)..(17): 2'-OMe-nucleotide
  modified_base (18)..(18): 2'-fluoro-nucleotide
  modified_base (19)..(19): 2'-OMe-nucleotide
  modified_base (20)..(20): 2'-fluoro-nucleotide
  modified_base (21)..(21): 2'-OMe-nucleotide
  modified_base (22)..(22): 2'-fluoro-nucleotide
  modified_base (23)..(23): Inverted nucleotide
ccagaguacugcaaucugacact

SEQ ID NO: 796 - DNA, 23 bp, Artificial Sequence
  source: /note="Description of Artificial Sequence: Synthetic oligonucleotide"
  source: /note="Description of Combined DNA/RNA Molecule: Synthetic oligonucleotide"
  modified_base (1)..(1): 2'-OMe-nucleotide
  modified_base (2)..(2): 2'-OMe-nucleotide
  modified_base (3)..(3): 2'-OMe-nucleotide
  modified_base (4)..(4): 2'-fluoro-nucleotide
  modified_base (5)..(5): 2'-OMe-nucleotide
  modified_base (6)..(6): 2'-fluoro-nucleotide
  modified_base (7)..(7): 2'-OMe-nucleotide
  modified_base (8)..(8): 2'-fluoro-nucleotide
  modified_base (9)..(9): 2'-OMe-nucleotide
  modified_base (10)..(10): 2'-fluoro-nucleotide
  modified_base (11)..(11): 2'-OMe-nucleotide
  modified_base (12)..(12): 2'-fluoro-nucleotide
  modified_base (13)..(13): 2'-OMe-nucleotide
  modified_base (14)..(14): 2'-fluoro-nucleotide
  modified_base (15)..(15): 2'-OMe-nucleotide
  modified_base (16)..(16): 2'-fluoro-nucleotide
  modified_base (17)..(17): 2'-OMe-nucleotide
  modified_base (18)..(18): 2'-fluoro-nucleotide
  modified_base (19)..(19): 2'-OMe-nucleotide
  modified_base (20)..(20): 2'-fluoro-nucleotide
  modified_base (21)..(21): 2'-OMe-nucleotide
  modified_base (22)..(22): 2'-fluoro-nucleotide
  modified_base (23)..(23): Inverted nucleotide
ccaugcaaucugacacaaugcut

SEQ ID NO: 797 - DNA, 23 bp, Artificial Sequence
  source: /note="Description of Artificial Sequence: Synthetic oligonucleotide"
  source: /note="Description of Combined DNA/RNA Molecule: Synthetic oligonucleotide"
  modified_base (1)..(1): 2'-OMe-nucleotide
  modified_base (2)..(2): 2'-OMe-nucleotide
  modified_base (3)..(3): 2'-OMe-nucleotide
  modified_base (4)..(4): 2'-fluoro-nucleotide
  modified_base (5)..(5): 2'-OMe-nucleotide
  modified_base (6)..(6): 2'-fluoro-nucleotide
  modified_base (7)..(7): 2'-OMe-nucleotide
  modified_base (8)..(8): 2'-fluoro-nucleotide
  modified_base (9)..(9): 2'-OMe-nucleotide
  modified_base (10)..(10): 2'-fluoro-nucleotide
  modified_base (11)..(11): 2'-OMe-nucleotide
  modified_base (12)..(12): 2'-fluoro-nucleotide
  modified_base (13)..(13): 2'-OMe-nucleotide
  modified_base (14)..(14): 2'-fluoro-nucleotide
  modified_base (15)..(15): 2'-OMe-nucleotide
  modified_base (16)..(16): 2'-fluoro-nucleotide
  modified_base (17)..(17): 2'-OMe-nucleotide
  modified_base (18)..(18): 2'-fluoro-nucleotide
  modified_base (19)..(19): 2'-OMe-nucleotide
  modified_base (20)..(20): 2'-fluoro-nucleotide
  modified_base (21)..(21): 2'-OMe-nucleotide
  modified_base (22)..(22): 2'-fluoro-nucleotide
  modified_base (23)..(23): Inverted nucleotide
ccagcaaucugacacaaugcuct

SEQ ID NO: 798 - DNA, 23 bp, Artificial Sequence
  source: /note="Description of Artificial Sequence: Synthetic oligonucleotide"
  source: /note="Description of Combined DNA/RNA Molecule: Synthetic oligonucleotide"
  modified_base (1)..(1): 2'-OMe-nucleotide
  modified_base (2)..(2): 2'-OMe-nucleotide
  modified_base (3)..(3): 2'-OMe-nucleotide
  modified_base (4)..(4): 2'-fluoro-nucleotide
  modified_base (5)..(5): 2'-OMe-nucleotide
  modified_base (6)..(6): 2'-fluoro-nucleotide
  modified_base (7)..(7): 2'-OMe-nucleotide
  modified_base (8)..(8): 2'-fluoro-nucleotide
  modified_base (9)..(9): 2'-OMe-nucleotide
  modified_base (10)..(10): 2'-fluoro-nucleotide
  modified_base (11)..(11): 2'-OMe-nucleotide
  modified_base (12)..(12): 2'-fluoro-nucleotide
  modified_base (13)..(13): 2'-OMe-nucleotide
  modified_base (14)..(14): 2'-fluoro-nucleotide
  modified_base (15)..(15): 2'-OMe-nucleotide
  modified_base (16)..(16): 2'-fluoro-nucleotide
  modified_base (17)..(17): 2'-OMe-nucleotide
  modified_base (18)..(18): 2'-fluoro-nucleotide
  modified_base (19)..(19): 2'-OMe-nucleotide
  modified_base (20)..(20): 2'-fluoro-nucleotide
  modified_base (21)..(21): 2'-OMe-nucleotide
  modified_base (22)..(22): 2'-fluoro-nucleotide
  modified_base (23)..(23): Inverted nucleotide
ccacaaucugacacaaugcucat

SEQ ID NO: 799 - DNA, 23 bp, Artificial Sequence
  source: /note="Description of Artificial Sequence: Synthetic oligonucleotide"
  source: /note="Description of Combined DNA/RNA Molecule: Synthetic oligonucleotide"
  modified_base (1)..(1): 2'-OMe-nucleotide
  modified_base (2)..(2): 2'-OMe-nucleotide
  modified_base (3)..(3): 2'-OMe-nucleotide
  modified_base (4)..(4): 2'-fluoro-nucleotide
  modified_base (5)..(5): 2'-OMe-nucleotide
  modified_base (6)..(6): 2'-fluoro-nucleotide
  modified_base (7)..(7): 2'-OMe-nucleotide
  modified_base (8)..(8): 2'-fluoro-nucleotide
  modified_base (9)..(9): 2'-OMe-nucleotide
  modified_base (10)..(10): 2'-fluoro-nucleotide
  modified_base (11)..(11): 2'-OMe-nucleotide
  modified_base (12)..(12): 2'-fluoro-nucleotide
  modified_base (13)..(13): 2'-OMe-nucleotide
  modified_base (14)..(14): 2'-fluoro-nucleotide
  modified_base (15)..(15): 2'-OMe-nucleotide
  modified_base (16)..(16): 2'-fluoro-nucleotide
  modified_base (17)..(17): 2'-OMe-nucleotide
  modified_base (18)..(18): 2'-fluoro-nucleotide
  modified_base (19)..(19): 2'-OMe-nucleotide
  modified_base (20)..(20): 2'-fluoro-nucleotide
  modified_base (21)..(21): 2'-OMe-nucleotide
  modified_base (22)..(22): 2'-fluoro-nucleotide
  modified_base (23)..(23): Inverted nucleotide
ccacucccacuguuguuccagut

SEQ ID NO: 800 - DNA, 23 bp, Artificial Sequence
  source: /note="Description of Artificial Sequence: Synthetic oligonucleotide"
  source: /note="Description of Combined DNA/RNA Molecule: Synthetic oligonucleotide"
  modified_base (1)..(1): 2'-OMe-nucleotide
  modified_base (2)..(2): 2'-OMe-nucleotide
  modified_base (3)..(3): 2'-OMe-nucleotide
  modified_base (4)..(4): 2'-fluoro-nucleotide
  modified_base (5)..(5): 2'-OMe-nucleotide
  modified_base (6)..(6): 2'-fluoro-nucleotide
  modified_base (7)..(7): 2'-OMe-nucleotide
  modified_base (8)..(8): 2'-fluoro-nucleotide
  modified_base (9)..(9): 2'-OMe-nucleotide
  modified_base (10)..(10): 2'-fluoro-nucleotide
  modified_base (11)..(11): 2'-OMe-nucleotide
  modified_base (12)..(12): 2'-fluoro-nucleotide
  modified_base (13)..(13): 2'-OMe-nucleotide
  modified_base (14)..(14): 2'-fluoro-nucleotide
  modified_base (15)..(15): 2'-OMe-nucleotide
  modified_base (16)..(16): 2'-fluoro-nucleotide
  modified_base (17)..(17): 2'-OMe-nucleotide
  modified_base (18)..(18): 2'-fluoro-nucleotide
  modified_base (19)..(19): 2'-OMe-nucleotide
  modified_base (20)..(20): 2'-fluoro-nucleotide
  modified_base (21)..(21): 2'-OMe-nucleotide
  modified_base (22)..(22): 2'-fluoro-nucleotide
  modified_base (23)..(23): Inverted nucleotide
ccaucccacuguuguuccaguut

SEQ ID NO: 801 - DNA, 23 bp, Artificial Sequence
  source: /note="Description of Artificial Sequence: Synthetic oligonucleotide"
  source: /note="Description of Combined DNA/RNA Molecule: Synthetic oligonucleotide"
  modified_base (1)..(1): 2'-OMe-nucleotide
  modified_base (2)..(2): 2'-OMe-nucleotide
  modified_base (3)..(3): 2'-OMe-nucleotide
  modified_base (4)..(4): 2'-fluoro-nucleotide
  modified_base (5)..(5): 2'-OMe-nucleotide
  modified_base (6)..(6): 2'-fluoro-nucleotide
  modified_base (7)..(7): 2'-OMe-nucleotide
  modified_base (8)..(8): 2'-fluoro-nucleotide
  modified_base (9)..(9): 2'-OMe-nucleotide
  modified_base (10)..(10): 2'-fluoro-nucleotide
  modified_base (11)..(11): 2'-OMe-nucleotide
  modified_base (12)..(12): 2'-fluoro-nucleotide
  modified_base (13)..(13): 2'-OMe-nucleotide
  modified_base (14)..(14): 2'-fluoro-nucleotide
  modified_base (15)..(15): 2'-OMe-nucleotide
  modified_base (16)..(16): 2'-fluoro-nucleotide
  modified_base (17)..(17): 2'-OMe-nucleotide
  modified_base (18)..(18): 2'-fluoro-nucleotide
  modified_base (19)..(19): 2'-OMe-nucleotide
  modified_base (20)..(20): 2'-fluoro-nucleotide
  modified_base (21)..(21): 2'-OMe-nucleotide
  modified_base (22)..(22): 2'-fluoro-nucleotide
  modified_base (23)..(23): Inverted nucleotide
ccaccacuguuguuccaguucct

SEQ ID NO: 802 - DNA, 23 bp, Artificial Sequence
  source: /note="Description of Artificial Sequence: Synthetic oligonucleotide"
  source: /note="Description of Combined DNA/RNA Molecule: Synthetic oligonucleotide"
  modified_base (1)..(1): 2'-OMe-nucleotide
  modified_base (2)..(2): 2'-OMe-nucleotide
  modified_base (3)..(3): 2'-OMe-nucleotide
  modified_base (4)..(4): 2'-fluoro-nucleotide
  modified_base (5)..(5): 2'-OMe-nucleotide
  modified_base (6)..(6): 2'-fluoro-nucleotide
  modified_base (7)..(7): 2'-OMe-nucleotide
  modified_base (8)..(8): 2'-fluoro-nucleotide
  modified_base (9)..(9): 2'-OMe-nucleotide
  modified_base (10)..(10): 2'-fluoro-nucleotide
  modified_base (11)..(11): 2'-OMe-nucleotide
  modified_base (12)..(12): 2'-fluoro-nucleotide
  modified_base (13)..(13): 2'-OMe-nucleotide
  modified_base (14)..(14): 2'-fluoro-nucleotide
  modified_base (15)..(15): 2'-OMe-nucleotide
  modified_base (16)..(16): 2'-fluoro-nucleotide
  modified_base (17)..(17): 2'-OMe-nucleotide
  modified_base (18)..(18): 2'-fluoro-nucleotide
  modified_base (19)..(19): 2'-OMe-nucleotide
  modified_base (20)..(20): 2'-fluoro-nucleotide
  modified_base (21)..(21): 2'-OMe-nucleotide
  modified_base (22)..(22): 2'-fluoro-nucleotide
  modified_base (23)..(23): Inverted nucleotide
ccacacuguuguuccaguuccat

SEQ ID NO: 803 - DNA, 23 bp, Artificial Sequence
  source: /note="Description of Artificial Sequence: Synthetic oligonucleotide"
  source: /note="Description of Combined DNA/RNA Molecule: Synthetic oligonucleotide"
  modified_base (1)..(1): 2'-OMe-nucleotide
  modified_base (2)..(2): 2'-OMe-nucleotide
  modified_base (3)..(3): 2'-OMe-nucleotide
  modified_base (4)..(4): 2'-fluoro-nucleotide
  modified_base (5)..(5): 2'-OMe-nucleotide
  modified_base (6)..(6): 2'-fluoro-nucleotide
  modified_base (7)..(7): 2'-OMe-nucleotide
  modified_base (8)..(8): 2'-fluoro-nucleotide
  modified_base (9)..(9): 2'-OMe-nucleotide
  modified_base (10)..(10): 2'-fluoro-nucleotide
  modified_base (11)..(11): 2'-OMe-nucleotide
  modified_base (12)..(12): 2'-fluoro-nucleotide
  modified_base (13)..(13): 2'-OMe-nucleotide
  modified_base (14)..(14): 2'-fluoro-nucleotide
  modified_base (15)..(15): 2'-OMe-nucleotide
  modified_base (16)..(16): 2'-fluoro-nucleotide
  modified_base (17)..(17): 2'-OMe-nucleotide
  modified_base (18)..(18): 2'-fluoro-nucleotide
  modified_base (19)..(19): 2'-OMe-nucleotide
  modified_base (20)..(20): 2'-fluoro-nucleotide
  modified_base (21)..(21): 2'-OMe-nucleotide
  modified_base (22)..(22): 2'-fluoro-nucleotide
  modified_base (23)..(23): Inverted nucleotide
ccaguuguuccaguuccaagcat

SEQ ID NO: 804 - DNA, 23 bp, Artificial Sequence
  source: /note="Description of Artificial Sequence: Synthetic oligonucleotide"
  source: /note="Description of Combined DNA/RNA Molecule: Synthetic oligonucleotide"
  modified_base (1)..(1): 2'-OMe-nucleotide
  modified_base (2)..(2): 2'-OMe-nucleotide
  modified_base (3)..(3): 2'-OMe-nucleotide
  modified_base (4)..(4): 2'-fluoro-nucleotide
  modified_base (5)..(5): 2'-OMe-nucleotide
  modified_base (6)..(6): 2'-fluoro-nucleotide
  modified_base (7)..(7): 2'-OMe-nucleotide
  modified_base (8)..(8): 2'-fluoro-nucleotide
  modified_base (9)..(9): 2'-OMe-nucleotide
  modified_base (10)..(10): 2'-fluoro-nucleotide
  modified_base (11)..(11): 2'-OMe-nucleotide
  modified_base (12)..(12): 2'-fluoro-nucleotide
  modified_base (13)..(13): 2'-OMe-nucleotide
  modified_base (14)..(14): 2'-fluoro-nucleotide
  modified_base (15)..(15): 2'-OMe-nucleotide
  modified_base (16)..(16): 2'-fluoro-nucleotide
  modified_base (17)..(17): 2'-OMe-nucleotide
  modified_base (18)..(18): 2'-fluoro-nucleotide
  modified_base (19)..(19): 2'-OMe-nucleotide
  modified_base (20)..(20): 2'-fluoro-nucleotide
  modified_base (21)..(21): 2'-OMe-nucleotide
  modified_base (22)..(22): 2'-fluoro-nucleotide
  modified_base (23)..(23): Inverted nucleotide
ccauguuccaguuccaagcaugt

SEQ ID NO: 805 - DNA, 23 bp, Artificial Sequence
  source: /note="Description of Artificial Sequence: Synthetic oligonucleotide"
  source: /note="Description of Combined DNA/RNA Molecule: Synthetic oligonucleotide"
  modified_base (1)..(1): 2'-OMe-nucleotide
  modified_base (2)..(2): 2'-OMe-nucleotide
  modified_base (3)..(3): 2'-OMe-nucleotide
  modified_base (4)..(4): 2'-fluoro-nucleotide
  modified_base (5)..(5): 2'-OMe-nucleotide
  modified_base (6)..(6): 2'-fluoro-nucleotide
  modified_base (7)..(7): 2'-OMe-nucleotide
  modified_base (8)..(8): 2'-fluoro-nucleotide
  modified_base (9)..(9): 2'-OMe-nucleotide
  modified_base (10)..(10): 2'-fluoro-nucleotide
  modified_base (11)..(11): 2'-OMe-nucleotide
  modified_base (12)..(12): 2'-fluoro-nucleotide
  modified_base (13)..(13): 2'-OMe-nucleotide
  modified_base (14)..(14): 2'-fluoro-nucleotide
  modified_base (15)..(15): 2'-OMe-nucleotide
  modified_base (16)..(16): 2'-fluoro-nucleotide
  modified_base (17)..(17): 2'-OMe-nucleotide
  modified_base (18)..(18): 2'-fluoro-nucleotide
  modified_base (19)..(19): 2'-OMe-nucleotide
  modified_base (20)..(20): 2'-fluoro-nucleotide
  modified_base (21)..(21): 2'-OMe-nucleotide
  modified_base (22)..(22): 2'-fluoro-nucleotide
  modified_base (23)..(23): Inverted nucleotide
ccaguuccaguuccaagcauggt

SEQ ID NO: 806 - DNA, 23 bp, Artificial Sequence
  source: /note="Description of Artificial Sequence: Synthetic oligonucleotide"
  source: /note="Description of Combined DNA/RNA Molecule: Synthetic oligonucleotide"
  modified_base (1)..(1): 2'-OMe-nucleotide
  modified_base (2)..(2): 2'-OMe-nucleotide
  modified_base (3)..(3): 2'-OMe-nucleotide
  modified_base (4)..(4): 2'-fluoro-nucleotide
  modified_base (5)..(5): 2'-OMe-nucleotide
  modified_base (6)..(6): 2'-fluoro-nucleotide
  modified_base (7)..(7): 2'-OMe-nucleotide
  modified_base (8)..(8): 2'-fluoro-nucleotide
  modified_base (9)..(9): 2'-OMe-nucleotide
  modified_base (10)..(10): 2'-fluoro-nucleotide
  modified_base (11)..(11): 2'-OMe-nucleotide
  modified_base (12)..(12): 2'-fluoro-nucleotide
  modified_base (13)..(13): 2'-OMe-nucleotide
  modified_base (14)..(14): 2'-fluoro-nucleotide
  modified_base (15)..(15): 2'-OMe-nucleotide
  modified_base (16)..(16): 2'-fluoro-nucleotide
  modified_base (17)..(17): 2'-OMe-nucleotide
  modified_base (18)..(18): 2'-fluoro-nucleotide
  modified_base (19)..(19): 2'-OMe-nucleotide
  modified_base (20)..(20): 2'-fluoro-nucleotide
  modified_base (21)..(21): 2'-OMe-nucleotide
  modified_base (22)..(22): 2'-fluoro-nucleotide
  modified_base (23)..(23): Inverted nucleotide
ccacauggaggcucauucugaat

SEQ ID NO: 807 - DNA, 23 bp, Artificial Sequence
  source: /note="Description of Artificial Sequence: Synthetic oligonucleotide"
  source: /note="Description of Combined DNA/RNA Molecule: Synthetic oligonucleotide"
  modified_base (1)..(1): 2'-OMe-nucleotide
  modified_base (2)..(2): 2'-OMe-nucleotide
  modified_base (3)..(3): 2'-OMe-nucleotide
  modified_base (4)..(4): 2'-fluoro-nucleotide
  modified_base (5)..(5): 2'-OMe-nucleotide
  modified_base (6)..(6): 2'-fluoro-nucleotide
  modified_base (7)..(7): 2'-OMe-nucleotide
  modified_base (8)..(8): 2'-fluoro-nucleotide
  modified_base (9)..(9): 2'-OMe-nucleotide
  modified_base (10)..(10): 2'-fluoro-nucleotide
  modified_base (11)..(11): 2'-OMe-nucleotide
  modified_base (12)..(12): 2'-fluoro-nucleotide
  modified_base (13)..(13): 2'-OMe-nucleotide
  modified_base (14)..(14): 2'-fluoro-nucleotide
  modified_base (15)..(15): 2'-OMe-nucleotide
  modified_base (16)..(16): 2'-fluoro-nucleotide
  modified_base (17)..(17): 2'-OMe-nucleotide
  modified_base (18)..(18): 2'-fluoro-nucleotide
  modified_base (19)..(19): 2'-OMe-nucleotide
  modified_base (20)..(20): 2'-fluoro-nucleotide
  modified_base (21)..(21): 2'-OMe-nucleotide
  modified_base (22)..(22): 2'-fluoro-nucleotide
  modified_base (23)..(23): Inverted nucleotide
ccaauggaggcucauucugaagt

SEQ ID NO: 808 - DNA, 23 bp, Artificial Sequence
  source: /note="Description of Artificial Sequence: Synthetic oligonucleotide"
  source: /note="Description of Combined DNA/RNA Molecule: Synthetic oligonucleotide"
  modified_base (1)..(1): 2'-OMe-nucleotide
  modified_base (2)..(2): 2'-OMe-nucleotide
  modified_base (3)..(3): 2'-OMe-nucleotide
  modified_base (4)..(4): 2'-fluoro-nucleotide
  modified_base (5)..(5): 2'-OMe-nucleotide
  modified_base (6)..(6): 2'-fluoro-nucleotide
  modified_base (7)..(7): 2'-OMe-nucleotide
  modified_base (8)..(8): 2'-fluoro-nucleotide
  modified_base (9)..(9): 2'-OMe-nucleotide
  modified_base (10)..(10): 2'-fluoro-nucleotide
  modified_base (11)..(11): 2'-OMe-nucleotide
  modified_base (12)..(12): 2'-fluoro-nucleotide
  modified_base (13)..(13): 2'-OMe-nucleotide
  modified_base (14)..(14): 2'-fluoro-nucleotide
  modified_base (15)..(15): 2'-OMe-nucleotide
  modified_base (16)..(16): 2'-fluoro-nucleotide
  modified_base (17)..(17): 2'-OMe-nucleotide
  modified_base (18)..(18): 2'-fluoro-nucleotide
  modified_base (19)..(19): 2'-OMe-nucleotide
  modified_base (20)..(20): 2'-fluoro-nucleotide
  modified_base (21)..(21): 2'-OMe-nucleotide
  modified_base (22)..(22): 2'-fluoro-nucleotide
  modified_base (23)..(23): Inverted nucleotide
ccaggaggcucauucugaagcat

SEQ ID NO: 809 - DNA, 23 bp, Artificial Sequence
  source: /note="Description of Artificial Sequence: Synthetic oligonucleotide"
  source: /note="Description of Combined DNA/RNA Molecule: Synthetic oligonucleotide"
  modified_base (1)..(1): 2'-OMe-nucleotide
  modified_base (2)..(2): 2'-OMe-nucleotide
  modified_base (3)..(3): 2'-OMe-nucleotide
  modified_base (4)..(4): 2'-fluoro-nucleotide
  modified_base (5)..(5): 2'-OMe-nucleotide
  modified_base (6)..(6): 2'-fluoro-nucleotide
  modified_base (7)..(7): 2'-OMe-nucleotide
  modified_base (8)..(8): 2'-fluoro-nucleotide
  modified_base (9)..(9): 2'-OMe-nucleotide
  modified_base (10)..(10): 2'-fluoro-nucleotide
  modified_base (11)..(11): 2'-OMe-nucleotide
  modified_base (12)..(12): 2'-fluoro-nucleotide
  modified_base (13)..(13): 2'-OMe-nucleotide
  modified_base (14)..(14): 2'-fluoro-nucleotide
  modified_base (15)..(15): 2'-OMe-nucleotide
  modified_base (16)..(16): 2'-fluoro-nucleotide
  modified_base (17)..(17): 2'-OMe-nucleotide
  modified_base (18)..(18): 2'-fluoro-nucleotide
  modified_base (19)..(19): 2'-OMe-nucleotide
  modified_base (20)..(20): 2'-fluoro-nucleotide
  modified_base (21)..(21): 2'-OMe-nucleotide
  modified_base (22)..(22): 2'-fluoro-nucleotide
  modified_base (23)..(23): Inverted nucleotide
ccacauucugaagcagcaccaat

SEQ ID NO: 810 - DNA, 23 bp, Artificial Sequence
  source: /note="Description of Artificial Sequence: Synthetic oligonucleotide"
  source: /note="Description of Combined DNA/RNA Molecule: Synthetic oligonucleotide"
  modified_base (1)..(1): 2'-OMe-nucleotide
  modified_base (2)..(2): 2'-OMe-nucleotide
  modified_base (3)..(3): 2'-OMe-nucleotide
  modified_base (4)..(4): 2'-fluoro-nucleotide
  modified_base (5)..(5): 2'-OMe-nucleotide
  modified_base (6)..(6): 2'-fluoro-nucleotide
  modified_base (7)..(7): 2'-OMe-nucleotide
  modified_base (8)..(8): 2'-fluoro-nucleotide
  modified_base (9)..(9): 2'-OMe-nucleotide
  modified_base (10)..(10): 2'-fluoro-nucleotide
  modified_base (11)..(11): 2'-OMe-nucleotide
  modified_base (12)..(12): 2'-fluoro-nucleotide
  modified_base (13)..(13): 2'-OMe-nucleotide
  modified_base (14)..(14): 2'-fluoro-nucleotide
  modified_base (15)..(15): 2'-OMe-nucleotide
  modified_base (16)..(16): 2'-fluoro-nucleotide
  modified_base (17)..(17): 2'-OMe-nucleotide
  modified_base (18)..(18): 2'-fluoro-nucleotide
  modified_base (19)..(19): 2'-OMe-nucleotide
  modified_base (20)..(20): 2'-fluoro-nucleotide
  modified_base (21)..(21): 2'-OMe-nucleotide
  modified_base (22)..(22): 2'-fluoro-nucleotide
  modified_base (23)..(23): Inverted nucleotide
ccagaagcagcaccaacugagct

SEQ ID NO: 811 - DNA, 23 bp, Artificial Sequence
  source: /note="Description of Artificial Sequence: Synthetic oligonucleotide"
  source: /note="Description of Combined DNA/RNA Molecule: Synthetic oligonucleotide"
  modified_base (1)..(1): 2'-OMe-nucleotide
  modified_base (2)..(2): 2'-OMe-nucleotide
  modified_base (3)..(3): 2'-OMe-nucleotide
  modified_base (4)..(4): 2'-fluoro-nucleotide
  modified_base (5)..(5): 2'-OMe-nucleotide
  modified_base (6)..(6): 2'-fluoro-nucleotide
  modified_base (7)..(7): 2'-OMe-nucleotide
  modified_base (8)..(8): 2'-fluoro-nucleotide
  modified_base (9)..(9): 2'-OMe-nucleotide
  modified_base (10)..(10): 2'-fluoro-nucleotide
  modified_base (11)..(11): 2'-OMe-nucleotide
  modified_base (12)..(12): 2'-fluoro-nucleotide
  modified_base (13)..(13): 2'-OMe-nucleotide
  modified_base (14)..(14): 2'-fluoro-nucleotide
  modified_base (15)..(15): 2'-OMe-nucleotide
  modified_base (16)..(16): 2'-fluoro-nucleotide
  modified_base (17)..(17): 2'-OMe-nucleotide
  modified_base (18)..(18): 2'-fluoro-nucleotide
  modified_base (19)..(19): 2'-OMe-nucleotide
  modified_base (20)..(20): 2'-fluoro-nucleotide
  modified_base (21)..(21): 2'-OMe-nucleotide
  modified_base (22)..(22): 2'-fluoro-nucleotide
  modified_base (23)..(23): Inverted nucleotide
ccagcagcaccaacugagcaaat

SEQ ID NO: 812 - DNA, 23 bp, Artificial Sequence
  source: /note="Description of Artificial Sequence: Synthetic oligonucleotide"
  source: /note="Description of Combined DNA/RNA Molecule: Synthetic oligonucleotide"
  modified_base (1)..(1): 2'-OMe-nucleotide
  modified_base (2)..(2): 2'-OMe-nucleotide
  modified_base (3)..(3): 2'-OMe-nucleotide
  modified_base (4)..(4): 2'-fluoro-nucleotide
  modified_base (5)..(5): 2'-OMe-nucleotide
  modified_base (6)..(6): 2'-fluoro-nucleotide
  modified_base (7)..(7): 2'-OMe-nucleotide
  modified_base (8)..(8): 2'-fluoro-nucleotide
  modified_base (9)..(9): 2'-OMe-nucleotide
  modified_base (10)..(10): 2'-fluoro-nucleotide
  modified_base (11)..(11): 2'-OMe-nucleotide
  modified_base (12)..(12): 2'-fluoro-nucleotide
  modified_base (13)..(13): 2'-OMe-nucleotide
  modified_base (14)..(14): 2'-fluoro-nucleotide
  modified_base (15)..(15): 2'-OMe-nucleotide
  modified_base (16)..(16): 2'-fluoro-nucleotide
  modified_base (17)..(17): 2'-OMe-nucleotide
  modified_base (18)..(18): 2'-fluoro-nucleotide
  modified_base (19)..(19): 2'-OMe-nucleotide
  modified_base (20)..(20): 2'-fluoro-nucleotide
  modified_base (21)..(21): 2'-OMe-nucleotide
  modified_base (22)..(22): 2'-fluoro-nucleotide
  modified_base (23)..(23): Inverted nucleotide
ccacggcagugcuaccaugguat

SEQ ID NO: 813 - DNA, 23 bp, Artificial Sequence
  source: /note="Description of Artificial Sequence: Synthetic oligonucleotide"
  source: /note="Description of Combined DNA/RNA Molecule: Synthetic oligonucleotide"
  modified_base (1)..(1): 2'-OMe-nucleotide
  modified_base (2)..(2): 2'-OMe-nucleotide
  modified_base (3)..(3): 2'-OMe-nucleotide
  modified_base (4)..(4): 2'-fluoro-nucleotide
  modified_base (5)..(5): 2'-OMe-nucleotide
  modified_base (6)..(6): 2'-fluoro-nucleotide
  modified_base (7)..(7): 2'-OMe-nucleotide
  modified_base (8)..(8): 2'-fluoro-nucleotide
  modified_base (9)..(9): 2'-OMe-nucleotide
  modified_base (10)..(10): 2'-fluoro-nucleotide
  modified_base (11)..(11): 2'-OMe-nucleotide
  modified_base (12)..(12): 2'-fluoro-nucleotide
  modified_base (13)..(13): 2'-OMe-nucleotide
  modified_base (14)..(14): 2'-fluoro-nucleotide
  modified_base (15)..(15): 2'-OMe-nucleotide
  modified_base (16)..(16): 2'-fluoro-nucleotide
  modified_base (17)..(17): 2'-OMe-nucleotide
  modified_base (18)..(18): 2'-fluoro-nucleotide
  modified_base (19)..(19): 2'-OMe-nucleotide
  modified_base (20)..(20): 2'-fluoro-nucleotide
  modified_base (21)..(21): 2'-OMe-nucleotide
  modified_base (22)..(22): 2'-fluoro-nucleotide
  modified_base (23)..(23): Inverted nucleotide
ccacagugcuaccaugguaaugt

SEQ ID NO: 814 - DNA, 23 bp, Artificial Sequence
  source: /note="Description of Artificial Sequence: Synthetic oligonucleotide"
  source: /note="Description of Combined DNA/RNA Molecule: Synthetic oligonucleotide"
  modified_base (1)..(1): 2'-OMe-nucleotide
  modified_base (2)..(2): 2'-OMe-nucleotide
  modified_base (3)..(3): 2'-OMe-nucleotide
  modified_base (4)..(4): 2'-fluoro-nucleotide
  modified_base (5)..(5): 2'-OMe-nucleotide
  modified_base (6)..(6): 2'-fluoro-nucleotide
  modified_base (7)..(7): 2'-OMe-nucleotide
  modified_base (8)..(8): 2'-fluoro-nucleotide
  modified_base (9)..(9): 2'-OMe-nucleotide
  modified_base (10)..(10): 2'-fluoro-nucleotide
  modified_base (11)..(11): 2'-OMe-nucleotide
  modified_base (12)..(12): 2'-fluoro-nucleotide
  modified_base (13)..(13): 2'-OMe-nucleotide
  modified_base (14)..(14): 2'-fluoro-nucleotide
  modified_base (15)..(15): 2'-OMe-nucleotide
  modified_base (16)..(16): 2'-fluoro-nucleotide
  modified_base (17)..(17): 2'-OMe-nucleotide
  modified_base (18)..(18): 2'-fluoro-nucleotide
  modified_base (19)..(19): 2'-OMe-nucleotide
  modified_base (20)..(20): 2'-fluoro-nucleotide
  modified_base (21)..(21): 2'-OMe-nucleotide
  modified_base (22)..(22): 2'-fluoro-nucleotide
  modified_base (23)..(23): Inverted nucleotide
ccagugcuaccaugguaauggct

SEQ ID NO: 815 - DNA, 23 bp, Artificial Sequence
  source: /note="Description of Artificial Sequence: Synthetic oligonucleotide"
  source: /note="Description of Combined DNA/RNA Molecule: Synthetic oligonucleotide"
  modified_base (1)..(1): 2'-OMe-nucleotide
  modified_base (2)..(2): 2'-OMe-nucleotide
  modified_base (3)..(3): 2'-OMe-nucleotide
  modified_base (4)..(4): 2'-fluoro-nucleotide
  modified_base (5)..(5): 2'-OMe-nucleotide
  modified_base (6)..(6): 2'-fluoro-nucleotide
  modified_base (7)..(7): 2'-OMe-nucleotide
  modified_base (8)..(8): 2'-fluoro-nucleotide
  modified_base (9)..(9): 2'-OMe-nucleotide
  modified_base (10)..(10): 2'-fluoro-nucleotide
  modified_base (11)..(11): 2'-OMe-nucleotide
  modified_base (12)..(12): 2'-fluoro-nucleotide
  modified_base (13)..(13): 2'-OMe-nucleotide
  modified_base (14)..(14): 2'-fluoro-nucleotide
  modified_base (15)..(15): 2'-OMe-nucleotide
  modified_base (16)..(16): 2'-fluoro-nucleotide
  modified_base (17)..(17): 2'-OMe-nucleotide
  modified_base (18)..(18): 2'-fluoro-nucleotide
  modified_base (19)..(19): 2'-OMe-nucleotide
  modified_base (20)..(20): 2'-fluoro-nucleotide
  modified_base (21)..(21): 2'-OMe-nucleotide
  modified_base (22)..(22): 2'-fluoro-nucleotide
  modified_base (23)..(23): Inverted nucleotide
ccacaugguaauggccagaguut

SEQ ID NO: 816 - DNA, 23 bp, Artificial Sequence
  source: /note="Description of Artificial Sequence: Synthetic oligonucleotide"
  source: /note="Description of Combined DNA/RNA Molecule: Synthetic oligonucleotide"
  modified_base (1)..(1): 2'-OMe-nucleotide
  modified_base (2)..(2): 2'-OMe-nucleotide
  modified_base (3)..(3): 2'-OMe-nucleotide
  modified_base (4)..(4): 2'-fluoro-nucleotide
  modified_base (5)..(5): 2'-OMe-nucleotide
  modified_base (6)..(6): 2'-fluoro-nucleotide
  modified_base (7)..(7): 2'-OMe-nucleotide
  modified_base (8)..(8): 2'-fluoro-nucleotide
  modified_base (9)..(9): 2'-OMe-nucleotide
  modified_base (10)..(10): 2'-fluoro-nucleotide
  modified_base (11)..(11): 2'-OMe-nucleotide
  modified_base (12)..(12): 2'-fluoro-nucleotide
  modified_base (13)..(13): 2'-OMe-nucleotide
  modified_base (14)..(14): 2'-fluoro-nucleotide
  modified_base (15)..(15): 2'-OMe-nucleotide
  modified_base (16)..(16): 2'-fluoro-nucleotide
  modified_base (17)..(17): 2'-OMe-nucleotide
  modified_base (18)..(18): 2'-fluoro-nucleotide
  modified_base (19)..(19): 2'-OMe-nucleotide
  modified_base (20)..(20): 2'-fluoro-nucleotide
  modified_base (21)..(21): 2'-OMe-nucleotide
  modified_base (22)..(22): 2'-fluoro-nucleotide
  modified_base (23)..(23): Inverted nucleotide
ccagguaauggccagaguuauct

SEQ ID NO: 817 - DNA, 23 bp, Artificial Sequence
  source: /note="Description of Artificial Sequence: Synthetic oligonucleotide"
  source: /note="Description of Combined DNA/RNA Molecule: Synthetic oligonucleotide"
  modified_base (1)..(1): 2'-OMe-nucleotide
  modified_base (2)..(2): 2'-OMe-nucleotide
  modified_base (3)..(3): 2'-OMe-nucleotide
  modified_base (4)..(4): 2'-fluoro-nucleotide
  modified_base (5)..(5): 2'-OMe-nucleotide
  modified_base (6)..(6): 2'-fluoro-nucleotide
  modified_base (7)..(7): 2'-OMe-nucleotide
  modified_base (8)..(8): 2'-fluoro-nucleotide
  modified_base (9)..(9): 2'-OMe-nucleotide
  modified_base (10)..(10): 2'-fluoro-nucleotide
  modified_base (11)..(11): 2'-OMe-nucleotide
  modified_base (12)..(12): 2'-fluoro-nucleotide
  modified_base (13)..(13): 2'-OMe-nucleotide
  modified_base (14)..(14): 2'-fluoro-nucleotide
  modified_base (15)..(15): 2'-OMe-nucleotide
  modified_base (16)..(16): 2'-fluoro-nucleotide
  modified_base (17)..(17): 2'-OMe-nucleotide
  modified_base (18)..(18): 2'-fluoro-nucleotide
  modified_base (19)..(19): 2'-OMe-nucleotide
  modified_base (20)..(20): 2'-fluoro-nucleotide
  modified_base (21)..(21): 2'-OMe-nucleotide
  modified_base (22)..(22): 2'-fluoro-nucleotide
  modified_base (23)..(23): Inverted nucleotide
ccaguaauggccagaguuaucgt

SEQ ID NO: 818 - DNA, 23 bp, Artificial Sequence
  source: /note="Description of Artificial Sequence: Synthetic oligonucleotide"
  source: /note="Description of Combined DNA/RNA Molecule: Synthetic oligonucleotide"
  modified_base (1)..(1): 2'-OMe-nucleotide
  modified_base (2)..(2): 2'-OMe-nucleotide
  modified_base (3)..(3): 2'-OMe-nucleotide
  modified_base (4)..(4): 2'-fluoro-nucleotide
  modified_base (5)..(5): 2'-OMe-nucleotide
  modified_base (6)..(6): 2'-fluoro-nucleotide
  modified_base (7)..(7): 2'-OMe-nucleotide
  modified_base (8)..(8): 2'-fluoro-nucleotide
  modified_base (9)..(9): 2'-OMe-nucleotide
  modified_base (10)..(10): 2'-fluoro-nucleotide
  modified_base (11)..(11): 2'-OMe-nucleotide
  modified_base (12)..(12): 2'-fluoro-nucleotide
  modified_base (13)..(13): 2'-OMe-nucleotide
  modified_base (14)..(14): 2'-fluoro-nucleotide
  modified_base (15)..(15): 2'-OMe-nucleotide
  modified_base (16)..(16): 2'-fluoro-nucleotide
  modified_base (17)..(17): 2'-OMe-nucleotide
  modified_base (18)..(18): 2'-fluoro-nucleotide
  modified_base (19)..(19): 2'-OMe-nucleotide
  modified_base (20)..(20): 2'-fluoro-nucleotide
  modified_base (21)..(21): 2'-OMe-nucleotide
  modified_base (22)..(22): 2'-fluoro-nucleotide
  modified_base (23)..(23): Inverted nucleotide
ccauaauggccagaguuaucgat

SEQ ID NO: 819 - DNA, 23 bp, Artificial Sequence
  source: /note="Description of Artificial Sequence: Synthetic oligonucleotide"
  source: /note="Description of Combined DNA/RNA Molecule: Synthetic oligonucleotide"
  modified_base (1)..(1): 2'-OMe-nucleotide
  modified_base (2)..(2): 2'-OMe-nucleotide
  modified_base (3)..(3): 2'-OMe-nucleotide
  modified_base (4)..(4): 2'-fluoro-nucleotide
  modified_base (5)..(5): 2'-OMe-nucleotide
  modified_base (6)..(6): 2'-fluoro-nucleotide
  modified_base (7)..(7): 2'-OMe-nucleotide
  modified_base (8)..(8): 2'-fluoro-nucleotide
  modified_base (9)..(9): 2'-OMe-nucleotide
  modified_base (10)..(10): 2'-fluoro-nucleotide
  modified_base (11)..(11): 2'-OMe-nucleotide
  modified_base (12)..(12): 2'-fluoro-nucleotide
  modified_base (13)..(13): 2'-OMe-nucleotide
  modified_base (14)..(14): 2'-fluoro-nucleotide
  modified_base (15)..(15): 2'-OMe-nucleotide
  modified_base (16)..(16): 2'-fluoro-nucleotide
  modified_base (17)..(17): 2'-OMe-nucleotide
  modified_base (18)..(18): 2'-fluoro-nucleotide
  modified_base (19)..(19): 2'-OMe-nucleotide
  modified_base (20)..(20): 2'-fluoro-nucleotide
  modified_base (21)..(21): 2'-OMe-nucleotide
  modified_base (22)..(22): 2'-fluoro-nucleotide
  modified_base (23)..(23): Inverted nucleotide
ccauggccagaguuaucgaggct

SEQ ID NO: 820 - DNA, 23 bp, Artificial Sequence
  source: /note="Description of Artificial Sequence: Synthetic oligonucleotide"
  source: /note="Description of Combined DNA/RNA Molecule: Synthetic oligonucleotide"
  modified_base (1)..(1): 2'-OMe-nucleotide
  modified_base (2)..(2): 2'-OMe-nucleotide
  modified_base (3)..(3): 2'-OMe-nucleotide
  modified_base (4)..(4): 2'-fluoro-nucleotide
  modified_base (5)..(5): 2'-OMe-nucleotide
  modified_base (6)..(6): 2'-fluoro-nucleotide
  modified_base (7)..(7): 2'-OMe-nucleotide
  modified_base (8)..(8): 2'-fluoro-nucleotide
  modified_base (9)..(9): 2'-OMe-nucleotide
  modified_base (10)..(10): 2'-fluoro-nucleotide
  modified_base (11)..(11): 2'-OMe-nucleotide
  modified_base (12)..(12): 2'-fluoro-nucleotide
  modified_base (13)..(13): 2'-OMe-nucleotide
  modified_base (14)..(14): 2'-fluoro-nucleotide
  modified_base (15)..(15): 2'-OMe-nucleotide
  modified_base (16)..(16): 2'-fluoro-nucleotide
  modified_base (17)..(17): 2'-OMe-nucleotide
  modified_base (18)..(18): 2'-fluoro-nucleotide
  modified_base (19)..(19): 2'-OMe-nucleotide
  modified_base (20)..(20): 2'-fluoro-nucleotide
  modified_base (21)..(21): 2'-OMe-nucleotide
  modified_base (22)..(22): 2'-fluoro-nucleotide
  modified_base (23)..(23): Inverted nucleotide
ccaggccagaguuaucgaggcat

SEQ ID NO: 821 - DNA, 23 bp, Artificial Sequence
  source: /note="Description of Artificial Sequence: Synthetic oligonucleotide"
  source: /note="Description of Combined DNA/RNA Molecule: Synthetic oligonucleotide"
  modified_base (1)..(1): 2'-OMe-nucleotide
  modified_base (2)..(2): 2'-OMe-nucleotide
  modified_base (3)..(3): 2'-OMe-nucleotide
  modified_base (4)..(4): 2'-fluoro-nucleotide
  modified_base (5)..(5): 2'-OMe-nucleotide
  modified_base (6)..(6): 2'-fluoro-nucleotide
  modified_base (7)..(7): 2'-OMe-nucleotide
  modified_base (8)..(8): 2'-fluoro-nucleotide
  modified_base (9)..(9): 2'-OMe-nucleotide
  modified_base (10)..(10): 2'-fluoro-nucleotide
  modified_base (11)..(11): 2'-OMe-nucleotide
  modified_base (12)..(12): 2'-fluoro-nucleotide
  modified_base (13)..(13): 2'-OMe-nucleotide
  modified_base (14)..(14): 2'-fluoro-nucleotide
  modified_base (15)..(15): 2'-OMe-nucleotide
  modified_base (16)..(16): 2'-fluoro-nucleotide
  modified_base (17)..(17): 2'-OMe-nucleotide
  modified_base (18)..(18): 2'-fluoro-nucleotide
  modified_base (19)..(19): 2'-OMe-nucleotide
  modified_base (20)..(20): 2'-fluoro-nucleotide
  modified_base (21)..(21): 2'-OMe-nucleotide
  modified_base (22)..(22): 2'-fluoro-nucleotide
  modified_base (23)..(23): Inverted nucleotide
ccagccagaguuaucgaggcact

SEQ ID NO: 822 - DNA, 23 bp, Artificial Sequence
  source: /note="Description of Artificial Sequence: Synthetic oligonucleotide"
  source: /note="Description of Combined DNA/RNA Molecule: Synthetic oligonucleotide"
  modified_base (1)..(1): 2'-OMe-nucleotide
  modified_base (2)..(2): 2'-OMe-nucleotide
  modified_base (3)..(3): 2'-OMe-nucleotide
  modified_base (4)..(4): 2'-fluoro-nucleotide
  modified_base (5)..(5): 2'-OMe-nucleotide
  modified_base (6)..(6): 2'-fluoro-nucleotide
  modified_base (7)..(7): 2'-OMe-nucleotide
  modified_base (8)..(8): 2'-fluoro-nucleotide
  modified_base (9)..(9): 2'-OMe-nucleotide
  modified_base (10)..(10): 2'-fluoro-nucleotide
  modified_base (11)..(11): 2'-OMe-nucleotide
  modified_base (12)..(12): 2'-fluoro-nucleotide
  modified_base (13)..(13): 2'-OMe-nucleotide
  modified_base (14)..(14): 2'-fluoro-nucleotide
  modified_base (15)..(15): 2'-OMe-nucleotide
  modified_base (16)..(16): 2'-fluoro-nucleotide
  modified_base (17)..(17): 2'-OMe-nucleotide
  modified_base (18)..(18): 2'-fluoro-nucleotide
  modified_base (19)..(19): 2'-OMe-nucleotide
  modified_base (20)..(20): 2'-fluoro-nucleotide
  modified_base (21)..(21): 2'-OMe-nucleotide
  modified_base (22)..(22): 2'-fluoro-nucleotide
  modified_base (23)..(23): Inverted nucleotide
ccaccagaguuaucgaggcacat

SEQ ID NO: 823 - DNA, 23 bp, Artificial Sequence
  source: /note="Description of Artificial Sequence: Synthetic oligonucleotide"
  source: /note="Description of Combined DNA/RNA Molecule: Synthetic oligonucleotide"
  modified_base (1)..(1): 2'-OMe-nucleotide
  modified_base (2)..(2): 2'-OMe-nucleotide
  modified_base (3)..(3): 2'-OMe-nucleotide
  modified_base (4)..(4): 2'-fluoro-nucleotide
  modified_base (5)..(5): 2'-OMe-nucleotide
  modified_base (6)..(6): 2'-fluoro-nucleotide
  modified_base (7)..(7): 2'-OMe-nucleotide
  modified_base (8)..(8): 2'-fluoro-nucleotide
  modified_base (9)..(9): 2'-OMe-nucleotide
  modified_base (10)..(10): 2'-fluoro-nucleotide
  modified_base (11)..(11): 2'-OMe-nucleotide
  modified_base (12)..(12): 2'-fluoro-nucleotide
  modified_base (13)..(13): 2'-OMe-nucleotide
  modified_base (14)..(14): 2'-fluoro-nucleotide
  modified_base (15)..(15): 2'-OMe-nucleotide
  modified_base (16)..(16): 2'-fluoro-nucleotide
  modified_base (17)..(17): 2'-OMe-nucleotide
  modified_base (18)..(18): 2'-fluoro-nucleotide
  modified_base (19)..(19): 2'-OMe-nucleotide
  modified_base (20)..(20): 2'-fluoro-nucleotide
  modified_base (21)..(21): 2'-OMe-nucleotide
  modified_base (22)..(22): 2'-fluoro-nucleotide
  modified_base (23)..(23): Inverted nucleotide
ccaagaguuaucgaggcacauut

SEQ ID NO: 824 - DNA, 23 bp, Artificial Sequence
  source: /note="Description of Artificial Sequence: Synthetic oligonucleotide"
  source: /note="Description of Combined DNA/RNA Molecule: Synthetic oligonucleotide"
  modified_base (1)..(1): 2'-OMe-nucleotide
  modified_base (2)..(2): 2'-OMe-nucleotide
  modified_base (3)..(3): 2'-OMe-nucleotide
  modified_base (4)..(4): 2'-fluoro-nucleotide
  modified_base (5)..(5): 2'-OMe-nucleotide
  modified_base (6)..(6): 2'-fluoro-nucleotide
  modified_base (7)..(7): 2'-OMe-nucleotide
  modified_base (8)..(8): 2'-fluoro-nucleotide
  modified_base (9)..(9): 2'-OMe-nucleotide
  modified_base (10)..(10): 2'-fluoro-nucleotide
  modified_base (11)..(11): 2'-OMe-nucleotide
  modified_base (12)..(12): 2'-fluoro-nucleotide
  modified_base (13)..(13): 2'-OMe-nucleotide
  modified_base (14)..(14): 2'-fluoro-nucleotide
  modified_base (15)..(15): 2'-OMe-nucleotide
  modified_base (16)..(16): 2'-fluoro-nucleotide
  modified_base (17)..(17): 2'-OMe-nucleotide
  modified_base (18)..(18): 2'-fluoro-nucleotide
  modified_base (19)..(19): 2'-OMe-nucleotide
  modified_base (20)..(20): 2'-fluoro-nucleotide
  modified_base (21)..(21): 2'-OMe-nucleotide
  modified_base (22)..(22): 2'-fluoro-nucleotide
  modified_base (23)..(23): Inverted nucleotide
ccagaguuaucgaggcacauuct

SEQ ID NO: 825 - DNA, 23 bp, Artificial Sequence
  source: /note="Description of Artificial Sequence: Synthetic oligonucleotide"
  source: /note="Description of Combined DNA/RNA Molecule: Synthetic oligonucleotide"
  modified_base (1)..(1): 2'-OMe-nucleotide
  modified_base (2)..(2): 2'-OMe-nucleotide
  modified_base (3)..(3): 2'-OMe-nucleotide
  modified_base (4)..(4): 2'-fluoro-nucleotide
  modified_base (5)..(5): 2'-OMe-nucleotide
  modified_base (6)..(6): 2'-fluoro-nucleotide
  modified_base (7)..(7): 2'-OMe-nucleotide
  modified_base (8)..(8): 2'-fluoro-nucleotide
  modified_base (9)..(9): 2'-OMe-nucleotide
  modified_base (10)..(10): 2'-fluoro-nucleotide
  modified_base (11)..(11): 2'-OMe-nucleotide
  modified_base (12)..(12): 2'-fluoro-nucleotide
  modified_base (13)..(13): 2'-OMe-nucleotide
  modified_base (14)..(14): 2'-fluoro-nucleotide
  modified_base (15)..(15): 2'-OMe-nucleotide
  modified_base (16)..(16): 2'-fluoro-nucleotide
  modified_base (17)..(17): 2'-OMe-nucleotide
  modified_base (18)..(18): 2'-fluoro-nucleotide
  modified_base (19)..(19): 2'-OMe-nucleotide
  modified_base (20)..(20): 2'-fluoro-nucleotide
  modified_base (21)..(21): 2'-OMe-nucleotide
  modified_base (22)..(22): 2'-fluoro-nucleotide
  modified_base (23)..(23): Inverted nucleotide
ccaaguuaucgaggcacauucut

SEQ ID NO: 826 - DNA, 23 bp, Artificial Sequence
  source: /note="Description of Artificial Sequence: Synthetic oligonucleotide"
  source: /note="Description of Combined DNA/RNA Molecule: Synthetic oligonucleotide"
  modified_base (1)..(1): 2'-OMe-nucleotide
  modified_base (2)..(2): 2'-OMe-nucleotide
  modified_base (3)..(3): 2'-OMe-nucleotide
  modified_base (4)..(4): 2'-fluoro-nucleotide
  modified_base (5)..(5): 2'-OMe-nucleotide
  modified_base (6)..(6): 2'-fluoro-nucleotide
  modified_base (7)..(7): 2'-OMe-nucleotide
  modified_base (8)..(8): 2'-fluoro-nucleotide
  modified_base (9)..(9): 2'-OMe-nucleotide
  modified_base (10)..(10): 2'-fluoro-nucleotide
  modified_base (11)..(11): 2'-OMe-nucleotide
  modified_base (12)..(12): 2'-fluoro-nucleotide
  modified_base (13)..(13): 2'-OMe-nucleotide
  modified_base (14)..(14): 2'-fluoro-nucleotide
  modified_base (15)..(15): 2'-OMe-nucleotide
  modified_base (16)..(16): 2'-fluoro-nucleotide
  modified_base (17)..(17): 2'-OMe-nucleotide
  modified_base (18)..(18): 2'-fluoro-nucleotide
  modified_base (19)..(19): 2'-OMe-nucleotide
  modified_base (20)..(20): 2'-fluoro-nucleotide
  modified_base (21)..(21): 2'-OMe-nucleotide
  modified_base (22)..(22): 2'-fluoro-nucleotide
  modified_base (23)..(23): Inverted nucleotide
ccagcacauucuccaccacugut

SEQ ID NO: 827 - DNA, 23 bp, Artificial Sequence
  source: /note="Description of Artificial Sequence: Synthetic oligonucleotide"
  source: /note="Description of Combined DNA/RNA Molecule: Synthetic oligonucleotide"
  modified_base (1)..(1): 2'-OMe-nucleotide
  modified_base (2)..(2): 2'-OMe-nucleotide
  modified_base (3)..(3): 2'-OMe-nucleotide
  modified_base (4)..(4): 2'-fluoro-nucleotide
  modified_base (5)..(5): 2'-OMe-nucleotide
  modified_base (6)..(6): 2'-fluoro-nucleotide
  modified_base (7)..(7): 2'-OMe-nucleotide
  modified_base (8)..(8): 2'-fluoro-nucleotide
  modified_base (9)..(9): 2'-OMe-nucleotide
  modified_base (10)..(10): 2'-fluoro-nucleotide
  modified_base (11)..(11): 2'-OMe-nucleotide
  modified_base (12)..(12): 2'-fluoro-nucleotide
  modified_base (13)..(13): 2'-OMe-nucleotide
  modified_base (14)..(14): 2'-fluoro-nucleotide
  modified_base (15)..(15): 2'-OMe-nucleotide
  modified_base (16)..(16): 2'-fluoro-nucleotide
  modified_base (17)..(17): 2'-OMe-nucleotide
  modified_base (18)..(18): 2'-fluoro-nucleotide
  modified_base (19)..(19): 2'-OMe-nucleotide
  modified_base (20)..(20): 2'-fluoro-nucleotide
  modified_base (21)..(21): 2'-OMe-nucleotide
  modified_base (22)..(22): 2'-fluoro-nucleotide
  modified_base (23)..(23): Inverted nucleotide
ccaauucuccaccacugucacat

SEQ ID NO: 828 - DNA, 23 bp, Artificial Sequence
  source: /note="Description of Artificial Sequence: Synthetic oligonucleotide"
  source: /note="Description of Combined DNA/RNA Molecule: Synthetic oligonucleotide"
  modified_base (1)..(1): 2'-OMe-nucleotide
  modified_base (2)..(2): 2'-OMe-nucleotide
  modified_base (3)..(3): 2'-OMe-nucleotide
  modified_base (4)..(4): 2'-fluoro-nucleotide
  modified_base (5)..(5): 2'-OMe-nucleotide
  modified_base (6)..(6): 2'-fluoro-nucleotide
  modified_base (7)..(7): 2'-OMe-nucleotide
  modified_base (8)..(8): 2'-fluoro-nucleotide
  modified_base (9)..(9): 2'-OMe-nucleotide
  modified_base (10)..(10): 2'-fluoro-nucleotide
  modified_base (11)..(11): 2'-OMe-nucleotide
  modified_base (12)..(12): 2'-fluoro-nucleotide
  modified_base (13)..(13): 2'-OMe-nucleotide
  modified_base (14)..(14): 2'-fluoro-nucleotide
  modified_base (15)..(15): 2'-OMe-nucleotide
  modified_base (16)..(16): 2'-fluoro-nucleotide
  modified_base (17)..(17): 2'-OMe-nucleotide
  modified_base (18)..(18): 2'-fluoro-nucleotide
  modified_base (19)..(19): 2'-OMe-nucleotide
  modified_base (20)..(20): 2'-fluoro-nucleotide
  modified_base (21)..(21): 2'-OMe-nucleotide
  modified_base (22)..(22): 2'-fluoro-nucleotide
  modified_base (23)..(23): Inverted nucleotide
ccacacaggaaggacaugucaat

SEQ ID NO: 829 - DNA, 23 bp, Artificial Sequence
  source: /note="Description of Artificial Sequence: Synthetic oligonucleotide"
  source: /note="Description of Combined DNA/RNA Molecule: Synthetic oligonucleotide"
  modified_base (1)..(1): 2'-OMe-nucleotide
  modified_base (2)..(2): 2'-OMe-nucleotide
  modified_base (3)..(3): 2'-OMe-nucleotide
  modified_base (4)..(4): 2'-fluoro-nucleotide
  modified_base (5)..(5): 2'-OMe-nucleotide
  modified_base (6)..(6): 2'-fluoro-nucleotide
  modified_base (7)..(7): 2'-OMe-nucleotide
  modified_base (8)..(8): 2'-fluoro-nucleotide
  modified_base (9)..(9): 2'-OMe-nucleotide
  modified_base (10)..(10): 2'-fluoro-nucleotide
  modified_base (11)..(11): 2'-OMe-nucleotide
  modified_base (12)..(12): 2'-fluoro-nucleotide
  modified_base (13)..(13): 2'-OMe-nucleotide
  modified_base (14)..(14): 2'-fluoro-nucleotide
  modified_base (15)..(15): 2'-OMe-nucleotide
  modified_base (16)..(16): 2'-fluoro-nucleotide
  modified_base (17)..(17): 2'-OMe-nucleotide
  modified_base (18)..(18): 2'-fluoro-nucleotide
  modified_base (19)..(19): 2'-OMe-nucleotide
  modified_base (20)..(20): 2'-fluoro-nucleotide
  modified_base (21)..(21): 2'-OMe-nucleotide
  modified_base (22)..(22): 2'-fluoro-nucleotide
  modified_base (23)..(23): Inverted nucleotide
ccagaaggacaugucaaucuugt

SEQ ID NO: 830 - DNA, 23 bp, Artificial Sequence
  source: /note="Description of Artificial Sequence: Synthetic oligonucleotide"
  source: /note="Description of Combined DNA/RNA Molecule: Synthetic oligonucleotide"
  modified_base (1)..(1): 2'-OMe-nucleotide
  modified_base (2)..(2): 2'-OMe-nucleotide
  modified_base (3)..(3): 2'-OMe-nucleotide
  modified_base (4)..(4): 2'-fluoro-nucleotide
  modified_base (5)..(5): 2'-OMe-nucleotide
  modified_base (6)..(6): 2'-fluoro-nucleotide
  modified_base (7)..(7): 2'-OMe-nucleotide
  modified_base (8)..(8): 2'-fluoro-nucleotide
  modified_base (9)..(9): 2'-OMe-nucleotide
  modified_base (10)..(10): 2'-fluoro-nucleotide
  modified_base (11)..(11): 2'-OMe-nucleotide
  modified_base (12)..(12): 2'-fluoro-nucleotide
  modified_base (13)..(13): 2'-OMe-nucleotide
  modified_base (14)..(14): 2'-fluoro-nucleotide
  modified_base (15)..(15): 2'-OMe-nucleotide
  modified_base (16)..(16): 2'-fluoro-nucleotide
  modified_base (17)..(17): 2'-OMe-nucleotide
  modified_base (18)..(18): 2'-fluoro-nucleotide
  modified_base (19)..(19): 2'-OMe-nucleotide
  modified_base (20)..(20): 2'-fluoro-nucleotide
  modified_base (21)..(21): 2'-OMe-nucleotide
  modified_base (22)..(22): 2'-fluoro-nucleotide
  modified_base (23)..(23): Inverted nucleotide
ccauuuaccauggaccccagcat

SEQ ID NO: 831 - DNA, 23 bp, Artificial Sequence
  source: /note="Description of Artificial Sequence: Synthetic oligonucleotide"
  source: /note="Description of Combined DNA/RNA Molecule: Synthetic oligonucleotide"
  modified_base (1)..(1): 2'-OMe-nucleotide
  modified_base (2)..(2): 2'-OMe-nucleotide
  modified_base (3)..(3): 2'-OMe-nucleotide
  modified_base (4)..(4): 2'-fluoro-nucleotide
  modified_base (5)..(5): 2'-OMe-nucleotide
  modified_base (6)..(6): 2'-fluoro-nucleotide
  modified_base (7)..(7): 2'-OMe-nucleotide
  modified_base (8)..(8): 2'-fluoro-nucleotide
  modified_base (9)..(9): 2'-OMe-nucleotide
  modified_base (10)..(10): 2'-fluoro-nucleotide
  modified_base (11)..(11): 2'-OMe-nucleotide
  modified_base (12)..(12): 2'-fluoro-nucleotide
  modified_base (13)..(13): 2'-OMe-nucleotide
  modified_base (14)..(14): 2'-fluoro-nucleotide
  modified_base (15)..(15): 2'-OMe-nucleotide
  modified_base (16)..(16): 2'-fluoro-nucleotide
  modified_base (17)..(17): 2'-OMe-nucleotide
  modified_base (18)..(18): 2'-fluoro-nucleotide
  modified_base (19)..(19): 2'-OMe-nucleotide
  modified_base (20)..(20): 2'-fluoro-nucleotide
  modified_base (21)..(21): 2'-OMe-nucleotide
  modified_base (22)..(22): 2'-fluoro-nucleotide
  modified_base (23)..(23): Inverted nucleotide
ccauuaccauggaccccagcaut

SEQ ID NO: 832 - DNA, 23 bp, Artificial Sequence
  source: /note="Description of Artificial Sequence: Synthetic oligonucleotide"
  source: /note="Description of Combined DNA/RNA Molecule: Synthetic oligonucleotide"
  modified_base (1)..(1): 2'-OMe-nucleotide
  modified_base (2)..(2): 2'-OMe-nucleotide
  modified_base (3)..(3): 2'-OMe-nucleotide
  modified_base (4)..(4): 2'-fluoro-nucleotide
  modified_base (5)..(5): 2'-OMe-nucleotide
  modified_base (6)..(6): 2'-fluoro-nucleotide
  modified_base (7)..(7): 2'-OMe-nucleotide
  modified_base (8)..(8): 2'-fluoro-nucleotide
  modified_base (9)..(9): 2'-OMe-nucleotide
  modified_base (10)..(10): 2'-fluoro-nucleotide
  modified_base (11)..(11): 2'-OMe-nucleotide
  modified_base (12)..(12): 2'-fluoro-nucleotide
  modified_base (13)..(13): 2'-OMe-nucleotide
  modified_base (14)..(14): 2'-fluoro-nucleotide
  modified_base (15)..(15): 2'-OMe-nucleotide
  modified_base (16)..(16): 2'-fluoro-nucleotide
  modified_base (17)..(17): 2'-OMe-nucleotide
  modified_base (18)..(18): 2'-fluoro-nucleotide
  modified_base (19)..(19): 2'-OMe-nucleotide
  modified_base (20)..(20): 2'-fluoro-nucleotide
  modified_base (21)..(21): 2'-OMe-nucleotide
  modified_base (22)..(22): 2'-fluoro-nucleotide
  modified_base (23)..(23): Inverted nucleotide
ccaacugcaaccugacgcgaugt

SEQ ID NO: 833 - DNA, 23 bp, Artificial Sequence
  source: /note="Description of Artificial Sequence: Synthetic oligonucleotide"
  source: /note="Description of Combined DNA/RNA Molecule: Synthetic oligonucleotide"
  modified_base (1)..(1): 2'-OMe-nucleotide
  modified_base (2)..(2): 2'-OMe-nucleotide
  modified_base (3)..(3): 2'-OMe-nucleotide
  modified_base (4)..(4): 2'-fluoro-nucleotide
  modified_base (5)..(5): 2'-OMe-nucleotide
  modified_base (6)..(6): 2'-fluoro-nucleotide
  modified_base (7)..(7): 2'-OMe-nucleotide
  modified_base (8)..(8): 2'-fluoro-nucleotide
  modified_base (9)..(9): 2'-OMe-nucleotide
  modified_base (10)..(10): 2'-fluoro-nucleotide
  modified_base (11)..(11): 2'-OMe-nucleotide
  modified_base (12)..(12): 2'-fluoro-nucleotide
  modified_base (13)..(13): 2'-OMe-nucleotide
  modified_base (14)..(14): 2'-fluoro-nucleotide
  modified_base (15)..(15): 2'-OMe-nucleotide
  modified_base (16)..(16): 2'-fluoro-nucleotide
  modified_base (17)..(17): 2'-OMe-nucleotide
  modified_base (18)..(18): 2'-fluoro-nucleotide
  modified_base (19)..(19): 2'-OMe-nucleotide
  modified_base (20)..(20): 2'-fluoro-nucleotide
  modified_base (21)..(21): 2'-OMe-nucleotide
  modified_base (22)..(22): 2'-fluoro-nucleotide
  modified_base (23)..(23): Inverted nucleotide
ccaaccugacgcgaugcucagat

SEQ ID NO: 834 - DNA, 23 bp, Artificial Sequence
  source: /note="Description of Artificial Sequence: Synthetic oligonucleotide"
  source: /note="Description of Combined DNA/RNA Molecule: Synthetic oligonucleotide"
  modified_base (1)..(1): 2'-OMe-nucleotide
  modified_base (2)..(2): 2'-OMe-nucleotide
  modified_base (3)..(3): 2'-OMe-nucleotide
  modified_base (4)..(4): 2'-fluoro-nucleotide
  modified_base (5)..(5): 2'-OMe-nucleotide
  modified_base (6)..(6): 2'-fluoro-nucleotide
  modified_base (7)..(7): 2'-OMe-nucleotide
  modified_base (8)..(8): 2'-fluoro-nucleotide
  modified_base (9)..(9): 2'-OMe-nucleotide
  modified_base (10)..(10): 2'-fluoro-nucleotide
  modified_base (11)..(11): 2'-OMe-nucleotide
  modified_base (12)..(12): 2'-fluoro-nucleotide
  modified_base (13)..(13): 2'-OMe-nucleotide
  modified_base (14)..(14): 2'-fluoro-nucleotide
  modified_base (15)..(15): 2'-OMe-nucleotide
  modified_base (16)..(16): 2'-fluoro-nucleotide
  modified_base (17)..(17): 2'-OMe-nucleotide
  modified_base (18)..(18): 2'-fluoro-nucleotide
  modified_base (19)..(19): 2'-OMe-nucleotide
  modified_base (20)..(20): 2'-fluoro-nucleotide
  modified_base (21)..(21): 2'-OMe-nucleotide
  modified_base (22)..(22): 2'-fluoro-nucleotide
  modified_base (23)..(23): Inverted nucleotide
ccaugacgcgaugcucagacact

SEQ ID NO: 835 - DNA, 23 bp, Artificial Sequence
  source: /note="Description of Artificial Sequence: Synthetic oligonucleotide"
  source: /note="Description of Combined DNA/RNA Molecule: Synthetic oligonucleotide"
  modified_base (1)..(1): 2'-OMe-nucleotide
  modified_base (2)..(2): 2'-OMe-nucleotide
  modified_base (3)..(3): 2'-OMe-nucleotide
  modified_base (4)..(4): 2'-fluoro-nucleotide
  modified_base (5)..(5): 2'-OMe-nucleotide
  modified_base (6)..(6): 2'-fluoro-nucleotide
  modified_base (7)..(7): 2'-OMe-nucleotide
  modified_base (8)..(8): 2'-fluoro-nucleotide
  modified_base (9)..(9): 2'-OMe-nucleotide
  modified_base (10)..(10): 2'-fluoro-nucleotide
  modified_base (11)..(11): 2'-OMe-nucleotide
  modified_base (12)..(12): 2'-fluoro-nucleotide
  modified_base (13)..(13): 2'-OMe-nucleotide
  modified_base (14)..(14): 2'-fluoro-nucleotide
  modified_base (15)..(15): 2'-OMe-nucleotide
  modified_base (16)..(16): 2'-fluoro-nucleotide
  modified_base (17)..(17): 2'-OMe-nucleotide
  modified_base (18)..(18): 2'-fluoro-nucleotide
  modified_base (19)..(19): 2'-OMe-nucleotide
  modified_base (20)..(20): 2'-fluoro-nucleotide
  modified_base (21)..(21): 2'-OMe-nucleotide
  modified_base (22)..(22): 2'-fluoro-nucleotide
  modified_base (23)..(23): Inverted nucleotide
ccagacgcgaugcucagacacat

SEQ ID NO: 836 - DNA, 23 bp, Artificial Sequence
  source: /note="Description of Artificial Sequence: Synthetic oligonucleotide"
  source: /note="Description of Combined DNA/RNA Molecule: Synthetic oligonucleotide"
  modified_base (1)..(1): 2'-OMe-nucleotide
  modified_base (2)..(2): 2'-OMe-nucleotide
  modified_base (3)..(3): 2'-OMe-nucleotide
  modified_base (4)..(4): 2'-fluoro-nucleotide
  modified_base (5)..(5): 2'-OMe-nucleotide
  modified_base (6)..(6): 2'-fluoro-nucleotide
  modified_base (7)..(7): 2'-OMe-nucleotide
  modified_base (8)..(8): 2'-fluoro-nucleotide
  modified_base (9)..(9): 2'-OMe-nucleotide
  modified_base (10)..(10): 2'-fluoro-nucleotide
  modified_base (11)..(11): 2'-OMe-nucleotide
  modified_base (12)..(12): 2'-fluoro-nucleotide
  modified_base (13)..(13): 2'-OMe-nucleotide
  modified_base (14)..(14): 2'-fluoro-nucleotide
  modified_base (15)..(15): 2'-OMe-nucleotide
  modified_base (16)..(16): 2'-fluoro-nucleotide
  modified_base (17)..(17): 2'-OMe-nucleotide
  modified_base (18)..(18): 2'-fluoro-nucleotide
  modified_base (19)..(19): 2'-OMe-nucleotide
  modified_base (20)..(20): 2'-fluoro-nucleotide
  modified_base (21)..(21): 2'-OMe-nucleotide
  modified_base (22)..(22): 2'-fluoro-nucleotide
  modified_base (23)..(23): Inverted nucleotide
ccaacgcgaugcucagacacagt

SEQ ID NO: 837 - DNA, 23 bp, Artificial Sequence
  source: /note="Description of Artificial Sequence: Synthetic oligonucleotide"
  source: /note="Description of Combined DNA/RNA Molecule: Synthetic oligonucleotide"
  modified_base (1)..(1): 2'-OMe-nucleotide
  modified_base (2)..(2): 2'-OMe-nucleotide
  modified_base (3)..(3): 2'-OMe-nucleotide
  modified_base (4)..(4): 2'-fluoro-nucleotide
  modified_base (5)..(5): 2'-OMe-nucleotide
  modified_base (6)..(6): 2'-fluoro-nucleotide
  modified_base (7)..(7): 2'-OMe-nucleotide
  modified_base (8)..(8): 2'-fluoro-nucleotide
  modified_base (9)..(9): 2'-OMe-nucleotide
  modified_base (10)..(10): 2'-fluoro-nucleotide
  modified_base (11)..(11): 2'-OMe-nucleotide
  modified_base (12)..(12): 2'-fluoro-nucleotide
  modified_base (13)..(13): 2'-OMe-nucleotide
  modified_base (14)..(14): 2'-fluoro-nucleotide
  modified_base (15)..(15): 2'-OMe-nucleotide
  modified_base (16)..(16): 2'-fluoro-nucleotide
  modified_base (17)..(17): 2'-OMe-nucleotide
  modified_base (18)..(18): 2'-fluoro-nucleotide
  modified_base (19)..(19): 2'-OMe-nucleotide
  modified_base (20)..(20): 2'-fluoro-nucleotide
  modified_base (21)..(21): 2'-OMe-nucleotide
  modified_base (22)..(22): 2'-fluoro-nucleotide
  modified_base (23)..(23): Inverted nucleotide
ccacgcgaugcucagacacagat

SEQ ID NO: 838 - DNA, 23 bp, Artificial Sequence
  source: /note="Description of Artificial Sequence: Synthetic oligonucleotide"
  source: /note="Description of Combined DNA/RNA Molecule: Synthetic oligonucleotide"
  modified_base (1)..(1): 2'-OMe-nucleotide
  modified_base (2)..(2): 2'-OMe-nucleotide
  modified_base (3)..(3): 2'-OMe-nucleotide
  modified_base (4)..(4): 2'-fluoro-nucleotide
  modified_base (5)..(5): 2'-OMe-nucleotide
  modified_base (6)..(6): 2'-fluoro-nucleotide
  modified_base (7)..(7): 2'-OMe-nucleotide
  modified_base (8)..(8): 2'-fluoro-nucleotide
  modified_base (9)..(9): 2'-OMe-nucleotide
  modified_base (10)..(10): 2'-fluoro-nucleotide
  modified_base (11)..(11): 2'-OMe-nucleotide
  modified_base (12)..(12): 2'-fluoro-nucleotide
  modified_base (13)..(13): 2'-OMe-nucleotide
  modified_base (14)..(14): 2'-fluoro-nucleotide
  modified_base (15)..(15): 2'-OMe-nucleotide
  modified_base (16)..(16): 2'-fluoro-nucleotide
  modified_base (17)..(17): 2'-OMe-nucleotide
  modified_base (18)..(18): 2'-fluoro-nucleotide
  modified_base (19)..(19): 2'-OMe-nucleotide
  modified_base (20)..(20): 2'-fluoro-nucleotide
  modified_base (21)..(21): 2'-OMe-nucleotide
  modified_base (22)..(22): 2'-fluoro-nucleotide
  modified_base (23)..(23): Inverted nucleotide
ccagaagugaaccucgaaucuct

SEQ ID NO: 839 - DNA, 23 bp, Artificial Sequence
  source: /note="Description of Artificial Sequence: Synthetic oligonucleotide"
  source: /note="Description of Combined DNA/RNA Molecule: Synthetic oligonucleotide"
  modified_base (1)..(1): 2'-OMe-nucleotide
  modified_base (2)..(2): 2'-OMe-nucleotide
  modified_base (3)..(3): 2'-OMe-nucleotide
  modified_base (4)..(4): 2'-fluoro-nucleotide
  modified_base (5)..(5): 2'-OMe-nucleotide
  modified_base (6)..(6): 2'-fluoro-nucleotide
  modified_base (7)..(7): 2'-OMe-nucleotide
  modified_base (8)..(8): 2'-fluoro-nucleotide
  modified_base (9)..(9): 2'-OMe-nucleotide
  modified_base (10)..(10): 2'-fluoro-nucleotide
  modified_base (11)..(11): 2'-OMe-nucleotide
  modified_base (12)..(12): 2'-fluoro-nucleotide
  modified_base (13)..(13): 2'-OMe-nucleotide
  modified_base (14)..(14): 2'-fluoro-nucleotide
  modified_base (15)..(15): 2'-OMe-nucleotide
  modified_base (16)..(16): 2'-fluoro-nucleotide
  modified_base (17)..(17): 2'-OMe-nucleotide
  modified_base (18)..(18): 2'-fluoro-nucleotide
  modified_base (19)..(19): 2'-OMe-nucleotide
  modified_base (20)..(20): 2'-fluoro-nucleotide
  modified_base (21)..(21): 2'-OMe-nucleotide
  modified_base (22)..(22): 2'-fluoro-nucleotide
  modified_base (23)..(23): Inverted nucleotide
ccacaggacugaauguuacauct

SEQ ID NO: 840 - DNA, 23 bp, Artificial Sequence
  source: /note="Description of Artificial Sequence: Synthetic oligonucleotide"
  source: /note="Description of Combined DNA/RNA Molecule: Synthetic oligonucleotide"
  modified_base (1)..(1): 2'-OMe-nucleotide
  modified_base (2)..(2): 2'-OMe-nucleotide
  modified_base (3)..(3): 2'-OMe-nucleotide
  modified_base (4)..(4): 2'-fluoro-nucleotide
  modified_base (5)..(5): 2'-OMe-nucleotide
  modified_base (6)..(6): 2'-fluoro-nucleotide
  modified_base (7)..(7): 2'-OMe-nucleotide
  modified_base (8)..(8): 2'-fluoro-nucleotide
  modified_base (9)..(9): 2'-OMe-nucleotide
  modified_base (10)..(10): 2'-fluoro-nucleotide
  modified_base (11)..(11): 2'-OMe-nucleotide
  modified_base (12)..(12): 2'-fluoro-nucleotide
  modified_base (13)..(13): 2'-OMe-nucleotide
  modified_base (14)..(14): 2'-fluoro-nucleotide
  modified_base (15)..(15): 2'-OMe-nucleotide
  modified_base (16)..(16): 2'-fluoro-nucleotide
  modified_base (17)..(17): 2'-OMe-nucleotide
  modified_base (18)..(18): 2'-fluoro-nucleotide
  modified_base (19)..(19): 2'-OMe-nucleotide
  modified_base (20)..(20): 2'-fluoro-nucleotide
  modified_base (21)..(21): 2'-OMe-nucleotide
  modified_base (22)..(22): 2'-fluoro-nucleotide
  modified_base (23)..(23): Inverted nucleotide
ccaacccaagguaccuuugggat

SEQ ID NO: 841 - DNA, 23 bp, Artificial Sequence
  source: /note="Description of Artificial Sequence: Synthetic oligonucleotide"
  source: /note="Description of Combined DNA/RNA Molecule: Synthetic oligonucleotide"
  modified_base (1)..(1): 2'-OMe-nucleotide
  modified_base (2)..(2): 2'-OMe-nucleotide
  modified_base (3)..(3): 2'-OMe-nucleotide
  modified_base (4)..(4): 2'-fluoro-nucleotide
  modified_base (5)..(5): 2'-OMe-nucleotide
  modified_base (6)..(6): 2'-fluoro-nucleotide
  modified_base (7)..(7): 2'-OMe-nucleotide
  modified_base (8)..(8): 2'-fluoro-nucleotide
  modified_base (9)..(9): 2'-OMe-nucleotide
  modified_base (10)..(10): 2'-fluoro-nucleotide
  modified_base (11)..(11): 2'-OMe-nucleotide
  modified_base (12)..(12): 2'-fluoro-nucleotide
  modified_base (13)..(13): 2'-OMe-nucleotide
  modified_base (14)..(14): 2'-fluoro-nucleotide
  modified_base (15)..(15): 2'-OMe-nucleotide
  modified_base (16)..(16): 2'-fluoro-nucleotide
  modified_base (17)..(17): 2'-OMe-nucleotide
  modified_base (18)..(18): 2'-fluoro-nucleotide
  modified_base (19)..(19): 2'-OMe-nucleotide
  modified_base (20)..(20): 2'-fluoro-nucleotide
  modified_base (21)..(21): 2'-OMe-nucleotide
  modified_base (22)..(22): 2'-fluoro-nucleotide
  modified_base (23)..(23): Inverted nucleotide
ccacccaagguaccuuugggact

SEQ ID NO: 842 - DNA, 23 bp, Artificial Sequence
  source: /note="Description of Artificial Sequence: Synthetic oligonucleotide"
  source: /note="Description of Combined DNA/RNA Molecule: Synthetic oligonucleotide"
  modified_base (1)..(1): 2'-OMe-nucleotide
  modified_base (2)..(2): 2'-OMe-nucleotide
  modified_base (3)..(3): 2'-OMe-nucleotide
  modified_base (4)..(4): 2'-fluoro-nucleotide
  modified_base (5)..(5): 2'-OMe-nucleotide
  modified_base (6)..(6): 2'-fluoro-nucleotide
  modified_base (7)..(7): 2'-OMe-nucleotide
  modified_base (8)..(8): 2'-fluoro-nucleotide
  modified_base (9)..(9): 2'-OMe-nucleotide
  modified_base (10)..(10): 2'-fluoro-nucleotide
  modified_base (11)..(11): 2'-OMe-nucleotide
  modified_base (12)..(12): 2'-fluoro-nucleotide
  modified_base (13)..(13): 2'-OMe-nucleotide
  modified_base (14)..(14): 2'-fluoro-nucleotide
  modified_base (15)..(15): 2'-OMe-nucleotide
  modified_base (16)..(16): 2'-fluoro-nucleotide
  modified_base (17)..(17): 2'-OMe-nucleotide
  modified_base (18)..(18): 2'-fluoro-nucleotide
  modified_base (19)..(19): 2'-OMe-nucleotide
  modified_base (20)..(20): 2'-fluoro-nucleotide
  modified_base (21)..(21): 2'-OMe-nucleotide
  modified_base (22)..(22): 2'-fluoro-nucleotide
  modified_base (23)..(23): Inverted nucleotide
ccauaccuuugggacuggccuut

SEQ ID NO: 843 - DNA, 23 bp, Artificial Sequence
  source: /note="Description of Artificial Sequence: Synthetic oligonucleotide"
  source: /note="Description of Combined DNA/RNA Molecule: Synthetic oligonucleotide"
  modified_base (1)..(1): 2'-OMe-nucleotide
  modified_base (2)..(2): 2'-OMe-nucleotide
  modified_base (3)..(3): 2'-OMe-nucleotide
  modified_base (4)..(4): 2'-fluoro-nucleotide
  modified_base (5)..(5): 2'-OMe-nucleotide
  modified_base (6)..(6): 2'-fluoro-nucleotide
  modified_base (7)..(7): 2'-OMe-nucleotide
  modified_base (8)..(8): 2'-fluoro-nucleotide
  modified_base (9)..(9): 2'-OMe-nucleotide
  modified_base (10)..(10): 2'-fluoro-nucleotide
  modified_base (11)..(11): 2'-OMe-nucleotide
  modified_base (12)..(12): 2'-fluoro-nucleotide
  modified_base (13)..(13): 2'-OMe-nucleotide
  modified_base (14)..(14): 2'-fluoro-nucleotide
  modified_base (15)..(15): 2'-OMe-nucleotide
  modified_base (16)..(16): 2'-fluoro-nucleotide
  modified_base (17)..(17): 2'-OMe-nucleotide
  modified_base (18)..(18): 2'-fluoro-nucleotide
  modified_base (19)..(19): 2'-OMe-nucleotide
  modified_base (20)..(20): 2'-fluoro-nucleotide
  modified_base (21)..(21): 2'-OMe-nucleotide
  modified_base (22)..(22): 2'-fluoro-nucleotide
  modified_base (23)..(23): Inverted nucleotide
ccaaccuuugggacuggccuuct

SEQ ID NO: 844 - DNA, 23 bp, Artificial Sequence
  source: /note="Description of Artificial Sequence: Synthetic oligonucleotide"
  source: /note="Description of Combined DNA/RNA Molecule: Synthetic oligonucleotide"
  modified_base (1)..(1): 2'-OMe-nucleotide
  modified_base (2)..(2): 2'-OMe-nucleotide
  modified_base (3)..(3): 2'-OMe-nucleotide
  modified_base (4)..(4): 2'-fluoro-nucleotide
  modified_base (5)..(5): 2'-OMe-nucleotide
  modified_base (6)..(6): 2'-fluoro-nucleotide
  modified_base (7)..(7): 2'-OMe-nucleotide
  modified_base (8)..(8): 2'-fluoro-nucleotide
  modified_base (9)..(9): 2'-OMe-nucleotide
  modified_base (10)..(10): 2'-fluoro-nucleotide
  modified_base (11)..(11): 2'-OMe-nucleotide
  modified_base (12)..(12): 2'-fluoro-nucleotide
  modified_base (13)..(13): 2'-OMe-nucleotide
  modified_base (14)..(14): 2'-fluoro-nucleotide
  modified_base (15)..(15): 2'-OMe-nucleotide
  modified_base (16)..(16): 2'-fluoro-nucleotide
  modified_base (17)..(17): 2'-OMe-nucleotide
  modified_base (18)..(18): 2'-fluoro-nucleotide
  modified_base (19)..(19): 2'-OMe-nucleotide
  modified_base (20)..(20): 2'-fluoro-nucleotide
  modified_base (21)..(21): 2'-OMe-nucleotide
  modified_base (22)..(22): 2'-fluoro-nucleotide
  modified_base (23)..(23): Inverted nucleotide
ccagacagcaaucaaacgaagat

SEQ ID NO: 845 - DNA, 23 bp, Artificial Sequence
  source: /note="Description of Artificial Sequence: Synthetic oligonucleotide"
  source: /note="Description of Combined DNA/RNA Molecule: Synthetic oligonucleotide"
  modified_base (1)..(1): 2'-OMe-nucleotide
  modified_base (2)..(2): 2'-OMe-nucleotide
  modified_base (3)..(3): 2'-OMe-nucleotide
  modified_base (4)..(4): 2'-fluoro-nucleotide
  modified_base (5)..(5): 2'-OMe-nucleotide
  modified_base (6)..(6): 2'-fluoro-nucleotide
  modified_base (7)..(7): 2'-OMe-nucleotide
  modified_base (8)..(8): 2'-fluoro-nucleotide
  modified_base (9)..(9): 2'-OMe-nucleotide
  modified_base (10)..(10): 2'-fluoro-nucleotide
  modified_base (11)..(11): 2'-OMe-nucleotide
  modified_base (12)..(12): 2'-fluoro-nucleotide
  modified_base (13)..(13): 2'-OMe-nucleotide
  modified_base (14)..(14): 2'-fluoro-nucleotide
  modified_base (15)..(15): 2'-OMe-nucleotide
  modified_base (16)..(16): 2'-fluoro-nucleotide
  modified_base (17)..(17): 2'-OMe-nucleotide
  modified_base (18)..(18): 2'-fluoro-nucleotide
  modified_base (19)..(19): 2'-OMe-nucleotide
  modified_base (20)..(20): 2'-fluoro-nucleotide
  modified_base (21)..(21): 2'-OMe-nucleotide
  modified_base (22)..(22): 2'-fluoro-nucleotide
  modified_base (23)..(23): Inverted nucleotide
ccaacagcaaucaaacgaagact

SEQ ID NO: 846 - DNA, 23 bp, Artificial Sequence
  source: /note="Description of Artificial Sequence: Synthetic oligonucleotide"
  source: /note="Description of Combined DNA/RNA Molecule: Synthetic oligonucleotide"
  modified_base (1)..(1): 2'-OMe-nucleotide
  modified_base (2)..(2): 2'-OMe-nucleotide
  modified_base (3)..(3): 2'-OMe-nucleotide
  modified_base (4)..(4): 2'-fluoro-nucleotide
  modified_base (5)..(5): 2'-OMe-nucleotide
  modified_base (6)..(6): 2'-fluoro-nucleotide
  modified_base (7)..(7): 2'-OMe-nucleotide
  modified_base (8)..(8): 2'-fluoro-nucleotide
  modified_base (9)..(9): 2'-OMe-nucleotide
  modified_base (10)..(10): 2'-fluoro-nucleotide
  modified_base (11)..(11): 2'-OMe-nucleotide
  modified_base (12)..(12): 2'-fluoro-nucleotide
  modified_base (13)..(13): 2'-OMe-nucleotide
  modified_base (14)..(14): 2'-fluoro-nucleotide
  modified_base (15)..(15): 2'-OMe-nucleotide
  modified_base (16)..(16): 2'-fluoro-nucleotide
  modified_base (17)..(17): 2'-OMe-nucleotide
  modified_base (18)..(18): 2'-fluoro-nucleotide
  modified_base (19)..(19): 2'-OMe-nucleotide
  modified_base (20)..(20): 2'-fluoro-nucleotide
  modified_base (21)..(21): 2'-OMe-nucleotide
  modified_base (22)..(22): 2'-fluoro-nucleotide
  modified_base (23)..(23): Inverted nucleotide
ccacagcaaucaaacgaagacat

SEQ ID NO: 847 - DNA, 23 bp, Artificial Sequence
  source: /note="Description of Artificial Sequence: Synthetic oligonucleotide"
  source: /note="Description of Combined DNA/RNA Molecule: Synthetic oligonucleotide"
  modified_base (1)..(1): 2'-OMe-nucleotide
  modified_base (2)..(2): 2'-OMe-nucleotide
  modified_base (3)..(3): 2'-OMe-nucleotide
  modified_base (4)..(4): 2'-fluoro-nucleotide
  modified_base (5)..(5): 2'-OMe-nucleotide
  modified_base (6)..(6): 2'-fluoro-nucleotide
  modified_base (7)..(7): 2'-OMe-nucleotide
  modified_base (8)..(8): 2'-fluoro-nucleotide
  modified_base (9)..(9): 2'-OMe-nucleotide
  modified_base (10)..(10): 2'-fluoro-nucleotide
  modified_base (11)..(11): 2'-OMe-nucleotide
  modified_base (12)..(12): 2'-fluoro-nucleotide
  modified_base (13)..(13): 2'-OMe-nucleotide
  modified_base (14)..(14): 2'-fluoro-nucleotide
  modified_base (15)..(15): 2'-OMe-nucleotide
  modified_base (16)..(16): 2'-fluoro-nucleotide
  modified_base (17)..(17): 2'-OMe-nucleotide
  modified_base (18)..(18): 2'-fluoro-nucleotide
  modified_base (19)..(19): 2'-OMe-nucleotide
  modified_base (20)..(20): 2'-fluoro-nucleotide
  modified_base (21)..(21): 2'-OMe-nucleotide
  modified_base (22)..(22): 2'-fluoro-nucleotide
  modified_base (23)..(23): Inverted nucleotide
ccaagcaaucaaacgaagacact

SEQ ID NO: 848 - DNA, 23 bp, Artificial Sequence
  source: /note="Description of Artificial Sequence: Synthetic oligonucleotide"
  source: /note="Description of Combined DNA/RNA Molecule: Synthetic oligonucleotide"
  modified_base (1)..(1): 2'-OMe-nucleotide
  modified_base (2)..(2): 2'-OMe-nucleotide
  modified_base (3)..(3): 2'-OMe-nucleotide
  modified_base (4)..(4): 2'-fluoro-nucleotide
  modified_base (5)..(5): 2'-OMe-nucleotide
  modified_base (6)..(6): 2'-fluoro-nucleotide
  modified_base (7)..(7): 2'-OMe-nucleotide
  modified_base (8)..(8): 2'-fluoro-nucleotide
  modified_base (9)..(9): 2'-OMe-nucleotide
  modified_base (10)..(10): 2'-fluoro-nucleotide
  modified_base (11)..(11): 2'-OMe-nucleotide
  modified_base (12)..(12): 2'-fluoro-nucleotide
  modified_base (13)..(13): 2'-OMe-nucleotide
  modified_base (14)..(14): 2'-fluoro-nucleotide
  modified_base (15)..(15): 2'-OMe-nucleotide
  modified_base (16)..(16): 2'-fluoro-nucleotide
  modified_base (17)..(17): 2'-OMe-nucleotide
  modified_base (18)..(18): 2'-fluoro-nucleotide
  modified_base (19)..(19): 2'-OMe-nucleotide
  modified_base (20)..(20): 2'-fluoro-nucleotide
  modified_base (21)..(21): 2'-OMe-nucleotide
  modified_base (22)..(22): 2'-fluoro-nucleotide
  modified_base (23)..(23): Inverted nucleotide
ccagcaaucaaacgaagacacut

SEQ ID NO: 849 - DNA, 23 bp, Artificial Sequence
  source: /note="Description of Artificial Sequence: Synthetic oligonucleotide"
  source: /note="Description of Combined DNA/RNA Molecule: Synthetic oligonucleotide"
  modified_base (1)..(1): 2'-OMe-nucleotide
  modified_base (2)..(2): 2'-OMe-nucleotide
  modified_base (3)..(3): 2'-OMe-nucleotide
  modified_base (4)..(4): 2'-fluoro-nucleotide
  modified_base (5)..(5): 2'-OMe-nucleotide
  modified_base (6)..(6): 2'-fluoro-nucleotide
  modified_base (7)..(7): 2'-OMe-nucleotide
  modified_base (8)..(8): 2'-fluoro-nucleotide
  modified_base (9)..(9): 2'-OMe-nucleotide
  modified_base (10)..(10): 2'-fluoro-nucleotide
  modified_base (11)..(11): 2'-OMe-nucleotide
  modified_base (12)..(12): 2'-fluoro-nucleotide
  modified_base (13)..(13): 2'-OMe-nucleotide
  modified_base (14)..(14): 2'-fluoro-nucleotide
  modified_base (15)..(15): 2'-OMe-nucleotide
  modified_base (16)..(16): 2'-fluoro-nucleotide
  modified_base (17)..(17): 2'-OMe-nucleotide
  modified_base (18)..(18): 2'-fluoro-nucleotide
  modified_base (19)..(19): 2'-OMe-nucleotide
  modified_base (20)..(20): 2'-fluoro-nucleotide
  modified_base (21)..(21): 2'-OMe-nucleotide
  modified_base (22)..(22): 2'-fluoro-nucleotide
  modified_base (23)..(23): Inverted nucleotide
ccacaaucaaacgaagacacugt

SEQ ID NO: 850 - DNA, 23 bp, Artificial Sequence
  source: /note="Description of Artificial Sequence: Synthetic oligonucleotide"
  source: /note="Description of Combined DNA/RNA Molecule: Synthetic oligonucleotide"
  modified_base (1)..(1): 2'-OMe-nucleotide
  modified_base (2)..(2): 2'-OMe-nucleotide
  modified_base (3)..(3): 2'-OMe-nucleotide
  modified_base (4)..(4): 2'-fluoro-nucleotide
  modified_base (5)..(5): 2'-OMe-nucleotide
  modified_base (6)..(6): 2'-fluoro-nucleotide
  modified_base (7)..(7): 2'-OMe-nucleotide
  modified_base (8)..(8): 2'-fluoro-nucleotide
  modified_base (9)..(9): 2'-OMe-nucleotide
  modified_base (10)..(10): 2'-fluoro-nucleotide
  modified_base (11)..(11): 2'-OMe-nucleotide
  modified_base (12)..(12): 2'-fluoro-nucleotide
  modified_base (13)..(13): 2'-OMe-nucleotide
  modified_base (14)..(14): 2'-fluoro-nucleotide
  modified_base (15)..(15): 2'-OMe-nucleotide
  modified_base (16)..(16): 2'-fluoro-nucleotide
  modified_base (17)..(17): 2'-OMe-nucleotide
  modified_base (18)..(18): 2'-fluoro-nucleotide
  modified_base (19)..(19): 2'-OMe-nucleotide
  modified_base (20)..(20): 2'-fluoro-nucleotide
  modified_base (21)..(21): 2'-OMe-nucleotide
  modified_base (22)..(22): 2'-fluoro-nucleotide
  modified_base (23)..(23): Inverted nucleotide
ccaaucaaacgaagacacuguut

SEQ ID NO: 851 - DNA, 23 bp, Artificial Sequence
  source: /note="Description of Artificial Sequence: Synthetic oligonucleotide"
  source: /note="Description of Combined DNA/RNA Molecule: Synthetic oligonucleotide"
  modified_base (1)..(1): 2'-OMe-nucleotide
  modified_base (2)..(2): 2'-OMe-nucleotide
  modified_base (3)..(3): 2'-OMe-nucleotide
  modified_base (4)..(4): 2'-fluoro-nucleotide
  modified_base (5)..(5): 2'-OMe-nucleotide
  modified_base (6)..(6): 2'-fluoro-nucleotide
  modified_base (7)..(7): 2'-OMe-nucleotide
  modified_base (8)..(8): 2'-fluoro-nucleotide
  modified_base (9)..(9): 2'-OMe-nucleotide
  modified_base (10)..(10): 2'-fluoro-nucleotide
  modified_base (11)..(11): 2'-OMe-nucleotide
  modified_base (12)..(12): 2'-fluoro-nucleotide
  modified_base (13)..(13): 2'-OMe-nucleotide
  modified_base (14)..(14): 2'-fluoro-nucleotide
  modified_base (15)..(15): 2'-OMe-nucleotide
  modified_base (16)..(16): 2'-fluoro-nucleotide
  modified_base (17)..(17): 2'-OMe-nucleotide
  modified_base (18)..(18): 2'-fluoro-nucleotide
  modified_base (19)..(19): 2'-OMe-nucleotide
  modified_base (20)..(20): 2'-fluoro-nucleotide
  modified_base (21)..(21): 2'-OMe-nucleotide
  modified_base (22)..(22): 2'-fluoro-nucleotide
  modified_base (23)..(23): Inverted nucleotide
ccaucaaacgaagacacuguuct

SEQ ID NO: 852 - DNA, 23 bp, Artificial Sequence
  source: /note="Description of Artificial Sequence: Synthetic oligonucleotide"
  source: /note="Description of Combined DNA/RNA Molecule: Synthetic oligonucleotide"
  modified_base (1)..(1): 2'-OMe-nucleotide
  modified_base (2)..(2): 2'-OMe-nucleotide
  modified_base (3)..(3): 2'-OMe-nucleotide
  modified_base (4)..(4): 2'-fluoro-nucleotide
  modified_base (5)..(5): 2'-OMe-nucleotide
  modified_base (6)..(6): 2'-fluoro-nucleotide
  modified_base (7)..(7): 2'-OMe-nucleotide
  modified_base (8)..(8): 2'-fluoro-nucleotide
  modified_base (9)..(9): 2'-OMe-nucleotide
  modified_base (10)..(10): 2'-fluoro-nucleotide
  modified_base (11)..(11): 2'-OMe-nucleotide
  modified_base (12)..(12): 2'-fluoro-nucleotide
  modified_base (13)..(13): 2'-OMe-nucleotide
  modified_base (14)..(14): 2'-fluoro-nucleotide
  modified_base (15)..(15): 2'-OMe-nucleotide
  modified_base (16)..(16): 2'-fluoro-nucleotide
  modified_base (17)..(17): 2'-OMe-nucleotide
  modified_base (18)..(18): 2'-fluoro-nucleotide
  modified_base (19)..(19): 2'-OMe-nucleotide
  modified_base (20)..(20): 2'-fluoro-nucleotide
  modified_base (21)..(21): 2'-OMe-nucleotide
  modified_base (22)..(22): 2'-fluoro-nucleotide
  modified_base (23)..(23): Inverted nucleotide
ccacaaacgaagacacuguucct

SEQ ID NO: 853 - DNA, 23 bp, Artificial Sequence
  source: /note="Description of Artificial Sequence: Synthetic oligonucleotide"
  source: /note="Description of Combined DNA/RNA Molecule: Synthetic oligonucleotide"
  modified_base (1)..(1): 2'-OMe-nucleotide
  modified_base (2)..(2): 2'-OMe-nucleotide
  modified_base (3)..(3): 2'-OMe-nucleotide
  modified_base (4)..(4): 2'-fluoro-nucleotide
  modified_base (5)..(5): 2'-OMe-nucleotide
  modified_base (6)..(6): 2'-fluoro-nucleotide
  modified_base (7)..(7): 2'-OMe-nucleotide
  modified_base (8)..(8): 2'-fluoro-nucleotide
  modified_base (9)..(9): 2'-OMe-nucleotide
  modified_base (10)..(10): 2'-fluoro-nucleotide
  modified_base (11)..(11): 2'-OMe-nucleotide
  modified_base (12)..(12): 2'-fluoro-nucleotide
  modified_base (13)..(13): 2'-OMe-nucleotide
  modified_base (14)..(14): 2'-fluoro-nucleotide
  modified_base (15)..(15): 2'-OMe-nucleotide
  modified_base (16)..(16): 2'-fluoro-nucleotide
  modified_base (17)..(17): 2'-OMe-nucleotide
  modified_base (18)..(18): 2'-fluoro-nucleotide
  modified_base (19)..(19): 2'-OMe-nucleotide
  modified_base (20)..(20): 2'-fluoro-nucleotide
  modified_base (21)..(21): 2'-OMe-nucleotide
  modified_base (22)..(22): 2'-fluoro-nucleotide
  modified_base (23)..(23): Inverted nucleotide
ccaaaacgaagacacuguuccct

SEQ ID NO: 854 - DNA, 23 bp, Artificial Sequence
  source: /note="Description of Artificial Sequence: Synthetic oligonucleotide"
  source: /note="Description of Combined DNA/RNA Molecule: Synthetic oligonucleotide"
  modified_base (1)..(1): 2'-OMe-nucleotide
  modified_base (2)..(2): 2'-OMe-nucleotide
  modified_base (3)..(3): 2'-OMe-nucleotide
  modified_base (4)..(4): 2'-fluoro-nucleotide
  modified_base (5)..(5): 2'-OMe-nucleotide
  modified_base (6)..(6): 2'-fluoro-nucleotide
  modified_base (7)..(7): 2'-OMe-nucleotide
  modified_base (8)..(8): 2'-fluoro-nucleotide
  modified_base (9)..(9): 2'-OMe-nucleotide
  modified_base (10)..(10): 2'-fluoro-nucleotide
  modified_base (11)..(11): 2'-OMe-nucleotide
  modified_base (12)..(12): 2'-fluoro-nucleotide
  modified_base (13)..(13): 2'-OMe-nucleotide
  modified_base (14)..(14): 2'-fluoro-nucleotide
  modified_base (15)..(15): 2'-OMe-nucleotide
  modified_base (16)..(16): 2'-fluoro-nucleotide
  modified_base (17)..(17): 2'-OMe-nucleotide
  modified_base (18)..(18): 2'-fluoro-nucleotide
  modified_base (19)..(19): 2'-OMe-nucleotide
  modified_base (20)..(20): 2'-fluoro-nucleotide
  modified_base (21)..(21): 2'-OMe-nucleotide
  modified_base (22)..(22): 2'-fluoro-nucleotide
  modified_base (23)..(23): Inverted nucleotide
ccaaacgaagacacuguucccat

SEQ ID NO: 855 - DNA, 23 bp, Artificial Sequence
  source: /note="Description of Artificial Sequence: Synthetic oligonucleotide"
  source: /note="Description of Combined DNA/RNA Molecule: Synthetic oligonucleotide"
  modified_base (1)..(1): 2'-OMe-nucleotide
  modified_base (2)..(2): 2'-OMe-nucleotide
  modified_base (3)..(3): 2'-OMe-nucleotide
  modified_base (4)..(4): 2'-fluoro-nucleotide
  modified_base (5)..(5): 2'-OMe-nucleotide
  modified_base (6)..(6): 2'-fluoro-nucleotide
  modified_base (7)..(7): 2'-OMe-nucleotide
  modified_base (8)..(8): 2'-fluoro-nucleotide
  modified_base (9)..(9): 2'-OMe-nucleotide
  modified_base (10)..(10): 2'-fluoro-nucleotide
  modified_base (11)..(11): 2'-OMe-nucleotide
  modified_base (12)..(12): 2'-fluoro-nucleotide
  modified_base (13)..(13): 2'-OMe-nucleotide
  modified_base (14)..(14): 2'-fluoro-nucleotide
  modified_base (15)..(15): 2'-OMe-nucleotide
  modified_base (16)..(16): 2'-fluoro-nucleotide
  modified_base (17)..(17): 2'-OMe-nucleotide
  modified_base (18)..(18): 2'-fluoro-nucleotide
  modified_base (19)..(19): 2'-OMe-nucleotide
  modified_base (20)..(20): 2'-fluoro-nucleotide
  modified_base (21)..(21): 2'-OMe-nucleotide
  modified_base (22)..(22): 2'-fluoro-nucleotide
  modified_base (23)..(23): Inverted nucleotide
ccaacgaagacacuguucccagt

SEQ ID NO: 856 - DNA, 23 bp, Artificial Sequence
  source: /note="Description of Artificial Sequence: Synthetic oligonucleotide"
  source: /note="Description of Combined DNA/RNA Molecule: Synthetic oligonucleotide"
  modified_base (1)..(1): 2'-OMe-nucleotide
  modified_base (2)..(2): 2'-OMe-nucleotide
  modified_base (3)..(3): 2'-OMe-nucleotide
  modified_base (4)..(4): 2'-fluoro-nucleotide
  modified_base (5)..(5): 2'-OMe-nucleotide
  modified_base (6)..(6): 2'-fluoro-nucleotide
  modified_base (7)..(7): 2'-OMe-nucleotide
  modified_base (8)..(8): 2'-fluoro-nucleotide
  modified_base (9)..(9): 2'-OMe-nucleotide
  modified_base (10)..(10): 2'-fluoro-nucleotide
  modified_base (11)..(11): 2'-OMe-nucleotide
  modified_base (12)..(12): 2'-fluoro-nucleotide
  modified_base (13)..(13): 2'-OMe-nucleotide
  modified_base (14)..(14): 2'-fluoro-nucleotide
  modified_base (15)..(15): 2'-OMe-nucleotide
  modified_base (16)..(16): 2'-fluoro-nucleotide
  modified_base (17)..(17): 2'-OMe-nucleotide
  modified_base (18)..(18): 2'-fluoro-nucleotide
  modified_base (19)..(19): 2'-OMe-nucleotide
  modified_base (20)..(20): 2'-fluoro-nucleotide
  modified_base (21)..(21): 2'-OMe-nucleotide
  modified_base (22)..(22): 2'-fluoro-nucleotide
  modified_base (23)..(23): Inverted nucleotide
ccacgaagacacuguucccagct

SEQ ID NO: 857 - DNA, 23 bp, Artificial Sequence
  source: /note="Description of Artificial Sequence: Synthetic oligonucleotide"
  source: /note="Description of Combined DNA/RNA Molecule: Synthetic oligonucleotide"
  modified_base (1)..(1): 2'-OMe-nucleotide
  modified_base (2)..(2): 2'-OMe-nucleotide
  modified_base (3)..(3): 2'-OMe-nucleotide
  modified_base (4)..(4): 2'-fluoro-nucleotide
  modified_base (5)..(5): 2'-OMe-nucleotide
  modified_base (6)..(6): 2'-fluoro-nucleotide
  modified_base (7)..(7): 2'-OMe-nucleotide
  modified_base (8)..(8): 2'-fluoro-nucleotide
  modified_base (9)..(9): 2'-OMe-nucleotide
  modified_base (10)..(10): 2'-fluoro-nucleotide
  modified_base (11)..(11): 2'-OMe-nucleotide
  modified_base (12)..(12): 2'-fluoro-nucleotide
  modified_base (13)..(13): 2'-OMe-nucleotide
  modified_base (14)..(14): 2'-fluoro-nucleotide
  modified_base (15)..(15): 2'-OMe-nucleotide
  modified_base (16)..(16): 2'-fluoro-nucleotide
  modified_base (17)..(17): 2'-OMe-nucleotide
  modified_base (18)..(18): 2'-fluoro-nucleotide
  modified_base (19)..(19): 2'-OMe-nucleotide
  modified_base (20)..(20): 2'-fluoro-nucleotide
  modified_base (21)..(21): 2'-OMe-nucleotide
  modified_base (22)..(22): 2'-fluoro-nucleotide
  modified_base (23)..(23): Inverted nucleotide
ccagaagacacuguucccagcut

SEQ ID NO: 858 - DNA, 23 bp, Artificial Sequence
  source: /note="Description of Artificial Sequence: Synthetic oligonucleotide"
  source: /note="Description of Combined DNA/RNA Molecule: Synthetic oligonucleotide"
  modified_base (1)..(1): 2'-OMe-nucleotide
  modified_base (2)..(2): 2'-OMe-nucleotide
  modified_base (3)..(3): 2'-OMe-nucleotide
  modified_base (4)..(4): 2'-fluoro-nucleotide
  modified_base (5)..(5): 2'-OMe-nucleotide
  modified_base (6)..(6): 2'-fluoro-nucleotide
  modified_base (7)..(7): 2'-OMe-nucleotide
  modified_base (8)..(8): 2'-fluoro-nucleotide
  modified_base (9)..(9): 2'-OMe-nucleotide
  modified_base (10)..(10): 2'-fluoro-nucleotide
  modified_base (11)..(11): 2'-OMe-nucleotide
  modified_base (12)..(12): 2'-fluoro-nucleotide
  modified_base (13)..(13): 2'-OMe-nucleotide
  modified_base (14)..(14): 2'-fluoro-nucleotide
  modified_base (15)..(15): 2'-OMe-nucleotide
  modified_base (16)..(16): 2'-fluoro-nucleotide
  modified_base (17)..(17): 2'-OMe-nucleotide
  modified_base (18)..(18): 2'-fluoro-nucleotide
  modified_base (19)..(19): 2'-OMe-nucleotide
  modified_base (20)..(20): 2'-fluoro-nucleotide
  modified_base (21)..(21): 2'-OMe-nucleotide
  modified_base (22)..(22): 2'-fluoro-nucleotide
  modified_base (23)..(23): Inverted nucleotide
ccaaagacacuguucccagcuat

SEQ ID NO: 859 - DNA, 23 bp, Artificial Sequence
  source: /note="Description of Artificial Sequence: Synthetic oligonucleotide"
  source: /note="Description of Combined DNA/RNA Molecule: Synthetic oligonucleotide"
  modified_base (1)..(1): 2'-OMe-nucleotide
  modified_base (2)..(2): 2'-OMe-nucleotide
  modified_base (3)..(3): 2'-OMe-nucleotide
  modified_base (4)..(4): 2'-fluoro-nucleotide
  modified_base (5)..(5): 2'-OMe-nucleotide
  modified_base (6)..(6): 2'-fluoro-nucleotide
  modified_base (7)..(7): 2'-OMe-nucleotide
  modified_base (8)..(8): 2'-fluoro-nucleotide
  modified_base (9)..(9): 2'-OMe-nucleotide
  modified_base (10)..(10): 2'-fluoro-nucleotide
  modified_base (11)..(11): 2'-OMe-nucleotide
  modified_base (12)..(12): 2'-fluoro-nucleotide
  modified_base (13)..(13): 2'-OMe-nucleotide
  modified_base (14)..(14): 2'-fluoro-nucleotide
  modified_base (15)..(15): 2'-OMe-nucleotide
  modified_base (16)..(16): 2'-fluoro-nucleotide
  modified_base (17)..(17): 2'-OMe-nucleotide
  modified_base (18)..(18): 2'-fluoro-nucleotide
  modified_base (19)..(19): 2'-OMe-nucleotide
  modified_base (20)..(20): 2'-fluoro-nucleotide
  modified_base (21)..(21): 2'-OMe-nucleotide
  modified_base (22)..(22): 2'-fluoro-nucleotide
  modified_base (23)..(23): Inverted nucleotide
ccaagacacuguucccagcuact

SEQ ID NO: 860 - DNA, 23 bp, Artificial Sequence
  source: /note="Description of Artificial Sequence: Synthetic oligonucleotide"
  source: /note="Description of Combined DNA/RNA Molecule: Synthetic oligonucleotide"
  modified_base (1)..(1): 2'-OMe-nucleotide
  modified_base (2)..(2): 2'-OMe-nucleotide
  modified_base (3)..(3): 2'-OMe-nucleotide
  modified_base (4)..(4): 2'-fluoro-nucleotide
  modified_base (5)..(5): 2'-OMe-nucleotide
  modified_base (6)..(6): 2'-fluoro-nucleotide
  modified_base (7)..(7): 2'-OMe-nucleotide
  modified_base (8)..(8): 2'-fluoro-nucleotide
  modified_base (9)..(9): 2'-OMe-nucleotide
  modified_base (10)..(10): 2'-fluoro-nucleotide
  modified_base (11)..(11): 2'-OMe-nucleotide
  modified_base (12)..(12): 2'-fluoro-nucleotide
  modified_base (13)..(13): 2'-OMe-nucleotide
  modified_base (14)..(14): 2'-fluoro-nucleotide
  modified_base (15)..(15): 2'-OMe-nucleotide
  modified_base (16)..(16): 2'-fluoro-nucleotide
  modified_base (17)..(17): 2'-OMe-nucleotide
  modified_base (18)..(18): 2'-fluoro-nucleotide
  modified_base (19)..(19): 2'-OMe-nucleotide
  modified_base (20)..(20): 2'-fluoro-nucleotide
  modified_base (21)..(21): 2'-OMe-nucleotide
  modified_base (22)..(22): 2'-fluoro-nucleotide
  modified_base (23)..(23): Inverted nucleotide
ccagacacuguucccagcuacct

SEQ ID NO: 861 - DNA, 23 bp, Artificial Sequence
  source: /note="Description of Artificial Sequence: Synthetic oligonucleotide"
  source: /note="Description of Combined DNA/RNA Molecule: Synthetic oligonucleotide"
  modified_base (1)..(1): 2'-OMe-nucleotide
  modified_base (2)..(2): 2'-OMe-nucleotide
  modified_base (3)..(3): 2'-OMe-nucleotide
  modified_base (4)..(4): 2'-fluoro-nucleotide
  modified_base (5)..(5): 2'-OMe-nucleotide
  modified_base (6)..(6): 2'-fluoro-nucleotide
  modified_base (7)..(7): 2'-OMe-nucleotide
  modified_base (8)..(8): 2'-fluoro-nucleotide
  modified_base (9)..(9): 2'-OMe-nucleotide
  modified_base (10)..(10): 2'-fluoro-nucleotide
  modified_base (11)..(11): 2'-OMe-nucleotide
  modified_base (12)..(12): 2'-fluoro-nucleotide
  modified_base (13)..(13): 2'-OMe-nucleotide
  modified_base (14)..(14): 2'-fluoro-nucleotide
  modified_base (15)..(15): 2'-OMe-nucleotide
  modified_base (16)..(16): 2'-fluoro-nucleotide
  modified_base (17)..(17): 2'-OMe-nucleotide
  modified_base (18)..(18): 2'-fluoro-nucleotide
  modified_base (19)..(19): 2'-OMe-nucleotide
  modified_base (20)..(20): 2'-fluoro-nucleotide
  modified_base (21)..(21): 2'-OMe-nucleotide
  modified_base (22)..(22): 2'-fluoro-nucleotide
  modified_base (23)..(23): Inverted nucleotide
ccaacacuguucccagcuaccat

SEQ ID NO: 862 - DNA, 23 bp, Artificial Sequence
  source: /note="Description of Artificial Sequence: Synthetic oligonucleotide"
  source: /note="Description of Combined DNA/RNA Molecule: Synthetic oligonucleotide"
  modified_base (1)..(1): 2'-OMe-nucleotide
  modified_base (2)..(2): 2'-OMe-nucleotide
  modified_base (3)..(3): 2'-OMe-nucleotide
  modified_base (4)..(4): 2'-fluoro-nucleotide
  modified_base (5)..(5): 2'-OMe-nucleotide
  modified_base (6)..(6): 2'-fluoro-nucleotide
  modified_base (7)..(7): 2'-OMe-nucleotide
  modified_base (8)..(8): 2'-fluoro-nucleotide
  modified_base (9)..(9): 2'-OMe-nucleotide
  modified_base (10)..(10): 2'-fluoro-nucleotide
  modified_base (11)..(11): 2'-OMe-nucleotide
  modified_base (12)..(12): 2'-fluoro-nucleotide
  modified_base (13)..(13): 2'-OMe-nucleotide
  modified_base (14)..(14): 2'-fluoro-nucleotide
  modified_base (15)..(15): 2'-OMe-nucleotide
  modified_base (16)..(16): 2'-fluoro-nucleotide
  modified_base (17)..(17): 2'-OMe-nucleotide
  modified_base (18)..(18): 2'-fluoro-nucleotide
  modified_base (19)..(19): 2'-OMe-nucleotide
  modified_base (20)..(20): 2'-fluoro-nucleotide
  modified_base (21)..(21): 2'-OMe-nucleotide
  modified_base (22)..(22): 2'-fluoro-nucleotide
  modified_base (23)..(23): Inverted nucleotide
ccaccagcuaccagcuaugccat

SEQ ID NO: 863 - DNA, 23 bp, Artificial Sequence
  source: /note="Description of Artificial Sequence: Synthetic oligonucleotide"
  source: /note="Description of Combined DNA/RNA Molecule: Synthetic oligonucleotide"
  modified_base (1)..(1): 2'-OMe-nucleotide
  modified_base (2)..(2): 2'-OMe-nucleotide
  modified_base (3)..(3): 2'-OMe-nucleotide
  modified_base (4)..(4): 2'-fluoro-nucleotide
  modified_base (5)..(5): 2'-OMe-nucleotide
  modified_base (6)..(6): 2'-fluoro-nucleotide
  modified_base (7)..(7): 2'-OMe-nucleotide
  modified_base (8)..(8): 2'-fluoro-nucleotide
  modified_base (9)..(9): 2'-OMe-nucleotide
  modified_base (10)..(10): 2'-fluoro-nucleotide
  modified_base (11)..(11): 2'-OMe-nucleotide
  modified_base (12)..(12): 2'-fluoro-nucleotide
  modified_base (13)..(13): 2'-OMe-nucleotide
  modified_base (14)..(14): 2'-fluoro-nucleotide
  modified_base (15)..(15): 2'-OMe-nucleotide
  modified_base (16)..(16): 2'-fluoro-nucleotide
  modified_base (17)..(17): 2'-OMe-nucleotide
  modified_base (18)..(18): 2'-fluoro-nucleotide
  modified_base (19)..(19): 2'-OMe-nucleotide
  modified_base (20)..(20): 2'-fluoro-nucleotide
  modified_base (21)..(21): 2'-OMe-nucleotide
  modified_base (22)..(22): 2'-fluoro-nucleotide
  modified_base (23)..(23): Inverted nucleotide
ccacagcuaccagcuaugccaat

SEQ ID NO: 864 - DNA, 23 bp, Artificial Sequence
  source: /note="Description of Artificial Sequence: Synthetic oligonucleotide"
  source: /note="Description of Combined DNA/RNA Molecule: Synthetic oligonucleotide"
  modified_base (1)..(1): 2'-OMe-nucleotide
  modified_base (2)..(2): 2'-OMe-nucleotide
  modified_base (3)..(3): 2'-OMe-nucleotide
  modified_base (4)..(4): 2'-fluoro-nucleotide
  modified_base (5)..(5): 2'-OMe-nucleotide
  modified_base (6)..(6): 2'-fluoro-nucleotide
  modified_base (7)..(7): 2'-OMe-nucleotide
  modified_base (8)..(8): 2'-fluoro-nucleotide
  modified_base (9)..(9): 2'-OMe-nucleotide
  modified_base (10)..(10): 2'-fluoro-nucleotide
  modified_base (11)..(11): 2'-OMe-nucleotide
  modified_base (12)..(12): 2'-fluoro-nucleotide
  modified_base (13)..(13): 2'-OMe-nucleotide
  modified_base (14)..(14): 2'-fluoro-nucleotide
  modified_base (15)..(15): 2'-OMe-nucleotide
  modified_base (16)..(16): 2'-fluoro-nucleotide
  modified_base (17)..(17): 2'-OMe-nucleotide
  modified_base (18)..(18): 2'-fluoro-nucleotide
  modified_base (19)..(19): 2'-OMe-nucleotide
  modified_base (20)..(20): 2'-fluoro-nucleotide
  modified_base (21)..(21): 2'-OMe-nucleotide
  modified_base (22)..(22): 2'-fluoro-nucleotide
  modified_base (23)..(23): Inverted nucleotide
ccaagcuaccagcuaugccaaat

SEQ ID NO: 865 - DNA, 23 bp, Artificial Sequence
  source: /note="Description of Artificial Sequence: Synthetic oligonucleotide"
  source: /note="Description of Combined DNA/RNA Molecule: Synthetic oligonucleotide"
  modified_base (1)..(1): 2'-OMe-nucleotide
  modified_base (2)..(2): 2'-OMe-nucleotide
  modified_base (3)..(3): 2'-OMe-nucleotide
  modified_base (4)..(4): 2'-fluoro-nucleotide
  modified_base (5)..(5): 2'-OMe-nucleotide
  modified_base (6)..(6): 2'-fluoro-nucleotide
  modified_base (7)..(7): 2'-OMe-nucleotide
  modified_base (8)..(8): 2'-fluoro-nucleotide
  modified_base (9)..(9): 2'-OMe-nucleotide
  modified_base (10)..(10): 2'-fluoro-nucleotide
  modified_base (11)..(11): 2'-OMe-nucleotide
  modified_base (12)..(12): 2'-fluoro-nucleotide
  modified_base (13)..(13): 2'-OMe-nucleotide
  modified_base (14)..(14): 2'-fluoro-nucleotide
  modified_base (15)..(15): 2'-OMe-nucleotide
  modified_base (16)..(16): 2'-fluoro-nucleotide
  modified_base (17)..(17): 2'-OMe-nucleotide
  modified_base (18)..(18): 2'-fluoro-nucleotide
  modified_base (19)..(19): 2'-OMe-nucleotide
  modified_base (20)..(20): 2'-fluoro-nucleotide
  modified_base (21)..(21): 2'-OMe-nucleotide
  modified_base (22)..(22): 2'-fluoro-nucleotide
  modified_base (23)..(23): Inverted nucleotide
ccagcuaccagcuaugccaaact

SEQ ID NO: 866 - DNA, 23 bp, Artificial Sequence
  source: /note="Description of Artificial Sequence: Synthetic oligonucleotide"
  source: /note="Description of Combined DNA/RNA Molecule: Synthetic oligonucleotide"
  modified_base (1)..(1): 2'-OMe-nucleotide
  modified_base (2)..(2): 2'-OMe-nucleotide
  modified_base (3)..(3): 2'-OMe-nucleotide
  modified_base (4)..(4): 2'-fluoro-nucleotide
  modified_base (5)..(5): 2'-OMe-nucleotide
  modified_base (6)..(6): 2'-fluoro-nucleotide
  modified_base (7)..(7): 2'-OMe-nucleotide
  modified_base (8)..(8): 2'-fluoro-nucleotide
  modified_base (9)..(9): 2'-OMe-nucleotide
  modified_base (10)..(10): 2'-fluoro-nucleotide
  modified_base (11)..(11): 2'-OMe-nucleotide
  modified_base (12)..(12): 2'-fluoro-nucleotide
  modified_base (13)..(13): 2'-OMe-nucleotide
  modified_base (14)..(14): 2'-fluoro-nucleotide
  modified_base (15)..(15): 2'-OMe-nucleotide
  modified_base (16)..(16): 2'-fluoro-nucleotide
  modified_base (17)..(17): 2'-OMe-nucleotide
  modified_base (18)..(18): 2'-fluoro-nucleotide
  modified_base (19)..(19): 2'-OMe-nucleotide
  modified_base (20)..(20): 2'-fluoro-nucleotide
  modified_base (21)..(21): 2'-OMe-nucleotide
  modified_base (22)..(22): 2'-fluoro-nucleotide
  modified_base (23)..(23): Inverted nucleotide
ccacuaccagcuaugccaaacct

SEQ ID NO: 867 - DNA, 23 bp, Artificial Sequence
  source: /note="Description of Artificial Sequence: Synthetic oligonucleotide"
  source: /note="Description of Combined DNA/RNA Molecule: Synthetic oligonucleotide"
  modified_base (1)..(1): 2'-OMe-nucleotide
  modified_base (2)..(2): 2'-OMe-nucleotide
  modified_base (3)..(3): 2'-OMe-nucleotide
  modified_base (4)..(4): 2'-fluoro-nucleotide
  modified_base (5)..(5): 2'-OMe-nucleotide
  modified_base (6)..(6): 2'-fluoro-nucleotide
  modified_base (7)..(7): 2'-OMe-nucleotide
  modified_base (8)..(8): 2'-fluoro-nucleotide
  modified_base (9)..(9): 2'-OMe-nucleotide
  modified_base (10)..(10): 2'-fluoro-nucleotide
  modified_base (11)..(11): 2'-OMe-nucleotide
  modified_base (12)..(12): 2'-fluoro-nucleotide
  modified_base (13)..(13): 2'-OMe-nucleotide
  modified_base (14)..(14): 2'-fluoro-nucleotide
  modified_base (15)..(15): 2'-OMe-nucleotide
  modified_base (16)..(16): 2'-fluoro-nucleotide
  modified_base (17)..(17): 2'-OMe-nucleotide
  modified_base (18)..(18): 2'-fluoro-nucleotide
  modified_base (19)..(19): 2'-OMe-nucleotide
  modified_base (20)..(20): 2'-fluoro-nucleotide
  modified_base (21)..(21): 2'-OMe-nucleotide
  modified_base (22)..(22): 2'-fluoro-nucleotide
  modified_base (23)..(23): Inverted nucleotide
ccauaccagcuaugccaaaccut

SEQ ID NO: 868 - DNA, 23 bp, Artificial Sequence
  source: /note="Description of Artificial Sequence: Synthetic oligonucleotide"
  source: /note="Description of Combined DNA/RNA Molecule: Synthetic oligonucleotide"
  modified_base (1)..(1): 2'-OMe-nucleotide
  modified_base (2)..(2): 2'-OMe-nucleotide
  modified_base (3)..(3): 2'-OMe-nucleotide
  modified_base (4)..(4): 2'-fluoro-nucleotide
  modified_base (5)..(5): 2'-OMe-nucleotide
  modified_base (6)..(6): 2'-fluoro-nucleotide
  modified_base (7)..(7): 2'-OMe-nucleotide
  modified_base (8)..(8): 2'-fluoro-nucleotide
  modified_base (9)..(9): 2'-OMe-nucleotide
  modified_base (10)..(10): 2'-fluoro-nucleotide
  modified_base (11)..(11): 2'-OMe-nucleotide
  modified_base (12)..(12): 2'-fluoro-nucleotide
  modified_base (13)..(13): 2'-OMe-nucleotide
  modified_base (14)..(14): 2'-fluoro-nucleotide
  modified_base (15)..(15): 2'-OMe-nucleotide
  modified_base (16)..(16): 2'-fluoro-nucleotide
  modified_base (17)..(17): 2'-OMe-nucleotide
  modified_base (18)..(18): 2'-fluoro-nucleotide
  modified_base (19)..(19): 2'-OMe-nucleotide
  modified_base (20)..(20): 2'-fluoro-nucleotide
  modified_base (21)..(21): 2'-OMe-nucleotide
  modified_base (22)..(22): 2'-fluoro-nucleotide
  modified_base (23)..(23): Inverted nucleotide
ccagcauuuuugguauuuuugut

SEQ ID NO: 869 - DNA, 23 bp, Artificial Sequence
  source: /note="Description of Artificial Sequence: Synthetic oligonucleotide"
  source: /note="Description of Combined DNA/RNA Molecule: Synthetic oligonucleotide"
  modified_base (1)..(1): 2'-OMe-nucleotide
  modified_base (2)..(2): 2'-OMe-nucleotide
  modified_base (3)..(3): 2'-OMe-nucleotide
  modified_base (4)..(4): 2'-fluoro-nucleotide
  modified_base (5)..(5): 2'-OMe-nucleotide
  modified_base (6)..(6): 2'-fluoro-nucleotide
  modified_base (7)..(7): 2'-OMe-nucleotide
  modified_base (8)..(8): 2'-fluoro-nucleotide
  modified_base (9)..(9): 2'-OMe-nucleotide
  modified_base (10)..(10): 2'-fluoro-nucleotide
  modified_base (11)..(11): 2'-OMe-nucleotide
  modified_base (12)..(12): 2'-fluoro-nucleotide
  modified_base (13)..(13): 2'-OMe-nucleotide
  modified_base (14)..(14): 2'-fluoro-nucleotide
  modified_base (15)..(15): 2'-OMe-nucleotide
  modified_base (16)..(16): 2'-fluoro-nucleotide
  modified_base (17)..(17): 2'-OMe-nucleotide
  modified_base (18)..(18): 2'-fluoro-nucleotide
  modified_base (19)..(19): 2'-OMe-nucleotide
  modified_base (20)..(20): 2'-fluoro-nucleotide
  modified_base (21)..(21): 2'-OMe-nucleotide
  modified_base (22)..(22): 2'-fluoro-nucleotide
  modified_base (23)..(23): Inverted nucleotide
ccacauuuuugguauuuuugugt

SEQ ID NO: 870 - DNA, 23 bp, Artificial Sequence
  source: /note="Description of Artificial Sequence: Synthetic oligonucleotide"
  source: /note="Description of Combined DNA/RNA Molecule: Synthetic oligonucleotide"
  modified_base (1)..(1): 2'-OMe-nucleotide
  modified_base (2)..(2): 2'-OMe-nucleotide
  modified_base (3)..(3): 2'-OMe-nucleotide
  modified_base (4)..(4): 2'-fluoro-nucleotide
  modified_base (5)..(5): 2'-OMe-nucleotide
  modified_base (6)..(6): 2'-fluoro-nucleotide
  modified_base (7)..(7): 2'-OMe-nucleotide
  modified_base (8)..(8): 2'-fluoro-nucleotide
  modified_base (9)..(9): 2'-OMe-nucleotide
  modified_base (10)..(10): 2'-fluoro-nucleotide
  modified_base (11)..(11): 2'-OMe-nucleotide
  modified_base (12)..(12): 2'-fluoro-nucleotide
  modified_base (13)..(13): 2'-OMe-nucleotide
  modified_base (14)..(14): 2'-fluoro-nucleotide
  modified_base (15)..(15): 2'-OMe-nucleotide
  modified_base (16)..(16): 2'-fluoro-nucleotide
  modified_base (17)..(17): 2'-OMe-nucleotide
  modified_base (18)..(18): 2'-fluoro-nucleotide
  modified_base (19)..(19): 2'-OMe-nucleotide
  modified_base (20)..(20): 2'-fluoro-nucleotide
  modified_base (21)..(21): 2'-OMe-nucleotide
  modified_base (22)..(22): 2'-fluoro-nucleotide
  modified_base (23)..(23): Inverted nucleotide
ccaauuuuugguauuuuugugut

SEQ ID NO: 871 - DNA, 23 bp, Artificial Sequence
  source: /note="Description of Artificial Sequence: Synthetic oligonucleotide"
  source: /note="Description of Combined DNA/RNA Molecule: Synthetic oligonucleotide"
  modified_base (1)..(1): 2'-OMe-nucleotide
  modified_base (2)..(2): 2'-OMe-nucleotide
  modified_base (3)..(3): 2'-OMe-nucleotide
  modified_base (4)..(4): 2'-fluoro-nucleotide
  modified_base (5)..(5): 2'-OMe-nucleotide
  modified_base (6)..(6): 2'-fluoro-nucleotide
  modified_base (7)..(7): 2'-OMe-nucleotide
  modified_base (8)..(8): 2'-fluoro-nucleotide
  modified_base (9)..(9): 2'-OMe-nucleotide
  modified_base (10)..(10): 2'-fluoro-nucleotide
  modified_base (11)..(11): 2'-OMe-nucleotide
  modified_base (12)..(12): 2'-fluoro-nucleotide
  modified_base (13)..(13): 2'-OMe-nucleotide
  modified_base (14)..(14): 2'-fluoro-nucleotide
  modified_base (15)..(15): 2'-OMe-nucleotide
  modified_base (16)..(16): 2'-fluoro-nucleotide
  modified_base (17)..(17): 2'-OMe-nucleotide
  modified_base (18)..(18): 2'-fluoro-nucleotide
  modified_base (19)..(19): 2'-OMe-nucleotide
  modified_base (20)..(20): 2'-fluoro-nucleotide
  modified_base (21)..(21): 2'-OMe-nucleotide
  modified_base (22)..(22): 2'-fluoro-nucleotide
  modified_base (23)..(23): Inverted nucleotide
ccauuuuugguauuuuuguguat

SEQ ID NO: 872 - DNA, 23 bp, Artificial Sequence
  source: /note="Description of Artificial Sequence: Synthetic oligonucleotide"
  source: /note="Description of Combined DNA/RNA Molecule: Synthetic oligonucleotide"
  modified_base (1)..(1): 2'-OMe-nucleotide
  modified_base (2)..(2): 2'-OMe-nucleotide
  modified_base (3)..(3): 2'-OMe-nucleotide
  modified_base (4)..(4): 2'-fluoro-nucleotide
  modified_base (5)..(5): 2'-OMe-nucleotide
  modified_base (6)..(6): 2'-fluoro-nucleotide
  modified_base (7)..(7): 2'-OMe-nucleotide
  modified_base (8)..(8): 2'-fluoro-nucleotide
  modified_base (9)..(9): 2'-OMe-nucleotide
  modified_base (10)..(10): 2'-fluoro-nucleotide
  modified_base (11)..(11): 2'-OMe-nucleotide
  modified_base (12)..(12): 2'-fluoro-nucleotide
  modified_base (13)..(13): 2'-OMe-nucleotide
  modified_base (14)..(14): 2'-fluoro-nucleotide
  modified_base (15)..(15): 2'-OMe-nucleotide
  modified_base (16)..(16): 2'-fluoro-nucleotide
  modified_base (17)..(17): 2'-OMe-nucleotide
  modified_base (18)..(18): 2'-fluoro-nucleotide
  modified_base (19)..(19): 2'-OMe-nucleotide
  modified_base (20)..(20): 2'-fluoro-nucleotide
  modified_base (21)..(21): 2'-OMe-nucleotide
  modified_base (22)..(22): 2'-fluoro-nucleotide
  modified_base (23)..(23): Inverted nucleotide
ccauuuugguauuuuuguguaut

SEQ ID NO: 873 - DNA, 23 bp, Artificial Sequence
  source: /note="Description of Artificial Sequence: Synthetic oligonucleotide"
  source: /note="Description of Combined DNA/RNA Molecule: Synthetic oligonucleotide"
  modified_base (1)..(1): 2'-OMe-nucleotide
  modified_base (2)..(2): 2'-OMe-nucleotide
  modified_base (3)..(3): 2'-OMe-nucleotide
  modified_base (4)..(4): 2'-fluoro-nucleotide
  modified_base (5)..(5): 2'-OMe-nucleotide
  modified_base (6)..(6): 2'-fluoro-nucleotide
  modified_base (7)..(7): 2'-OMe-nucleotide
  modified_base (8)..(8): 2'-fluoro-nucleotide
  modified_base (9)..(9): 2'-OMe-nucleotide
  modified_base (10)..(10): 2'-fluoro-nucleotide
  modified_base (11)..(11): 2'-OMe-nucleotide
  modified_base (12)..(12): 2'-fluoro-nucleotide
  modified_base (13)..(13): 2'-OMe-nucleotide
  modified_base (14)..(14): 2'-fluoro-nucleotide
  modified_base (15)..(15): 2'-OMe-nucleotide
  modified_base (16)..(16): 2'-fluoro-nucleotide
  modified_base (17)..(17): 2'-OMe-nucleotide
  modified_base (18)..(18): 2'-fluoro-nucleotide
  modified_base (19)..(19): 2'-OMe-nucleotide
  modified_base (20)..(20): 2'-fluoro-nucleotide
  modified_base (21)..(21): 2'-OMe-nucleotide
  modified_base (22)..(22): 2'-fluoro-nucleotide
  modified_base (23)..(23): Inverted nucleotide
ccauuugguauuuuuguguauat

SEQ ID NO: 874 - DNA, 23 bp, Artificial Sequence
  source: /note="Description of Artificial Sequence: Synthetic oligonucleotide"
  source: /note="Description of Combined DNA/RNA Molecule: Synthetic oligonucleotide"
  modified_base (1)..(1): 2'-OMe-nucleotide
  modified_base (2)..(2): 2'-OMe-nucleotide
  modified_base (3)..(3): 2'-OMe-nucleotide
  modified_base (4)..(4): 2'-fluoro-nucleotide
  modified_base (5)..(5): 2'-OMe-nucleotide
  modified_base (6)..(6): 2'-fluoro-nucleotide
  modified_base (7)..(7): 2'-OMe-nucleotide
  modified_base (8)..(8): 2'-fluoro-nucleotide
  modified_base (9)..(9): 2'-OMe-nucleotide
  modified_base (10)..(10): 2'-fluoro-nucleotide
  modified_base (11)..(11): 2'-OMe-nucleotide
  modified_base (12)..(12): 2'-fluoro-nucleotide
  modified_base (13)..(13): 2'-OMe-nucleotide
  modified_base (14)..(14): 2'-fluoro-nucleotide
  modified_base (15)..(15): 2'-OMe-nucleotide
  modified_base (16)..(16): 2'-fluoro-nucleotide
  modified_base (17)..(17): 2'-OMe-nucleotide
  modified_base (18)..(18): 2'-fluoro-nucleotide
  modified_base (19)..(19): 2'-OMe-nucleotide
  modified_base (20)..(20): 2'-fluoro-nucleotide
  modified_base (21)..(21): 2'-OMe-nucleotide
  modified_base (22)..(22): 2'-fluoro-nucleotide
  modified_base (23)..(23): Inverted nucleotide
ccauugguauuuuuguguauaat

SEQ ID NO: 875 - DNA, 23 bp, Artificial Sequence
  source: /note="Description of Artificial Sequence: Synthetic oligonucleotide"
  source: /note="Description of Combined DNA/RNA Molecule: Synthetic oligonucleotide"
  modified_base (1)..(1): 2'-OMe-nucleotide
  modified_base (2)..(2): 2'-OMe-nucleotide
  modified_base (3)..(3): 2'-OMe-nucleotide
  modified_base (4)..(4): 2'-fluoro-nucleotide
  modified_base (5)..(5): 2'-OMe-nucleotide
  modified_base (6)..(6): 2'-fluoro-nucleotide
  modified_base (7)..(7): 2'-OMe-nucleotide
  modified_base (8)..(8): 2'-fluoro-nucleotide
  modified_base (9)..(9): 2'-OMe-nucleotide
  modified_base (10)..(10): 2'-fluoro-nucleotide
  modified_base (11)..(11): 2'-OMe-nucleotide
  modified_base (12)..(12): 2'-fluoro-nucleotide
  modified_base (13)..(13): 2'-OMe-nucleotide
  modified_base (14)..(14): 2'-fluoro-nucleotide
  modified_base (15)..(15): 2'-OMe-nucleotide
  modified_base (16)..(16): 2'-fluoro-nucleotide
  modified_base (17)..(17): 2'-OMe-nucleotide
  modified_base (18)..(18): 2'-fluoro-nucleotide
  modified_base (19)..(19): 2'-OMe-nucleotide
  modified_base (20)..(20): 2'-fluoro-nucleotide
  modified_base (21)..(21): 2'-OMe-nucleotide
  modified_base (22)..(22): 2'-fluoro-nucleotide
  modified_base (23)..(23): Inverted nucleotide
ccaugguauuuuuguguauaagt

SEQ ID NO: 876 - DNA, 23 bp, Artificial Sequence
  source: /note="Description of Artificial Sequence: Synthetic oligonucleotide"
  source: /note="Description of Combined DNA/RNA Molecule: Synthetic oligonucleotide"
  modified_base (1)..(1): 2'-OMe-nucleotide
  modified_base (2)..(2): 2'-OMe-nucleotide
  modified_base (3)..(3): 2'-OMe-nucleotide
  modified_base (4)..(4): 2'-fluoro-nucleotide
  modified_base (5)..(5): 2'-OMe-nucleotide
  modified_base (6)..(6): 2'-fluoro-nucleotide
  modified_base (7)..(7): 2'-OMe-nucleotide
  modified_base (8)..(8): 2'-fluoro-nucleotide
  modified_base (9)..(9): 2'-OMe-nucleotide
  modified_base (10)..(10): 2'-fluoro-nucleotide
  modified_base (11)..(11): 2'-OMe-nucleotide
  modified_base (12)..(12): 2'-fluoro-nucleotide
  modified_base (13)..(13): 2'-OMe-nucleotide
  modified_base (14)..(14): 2'-fluoro-nucleotide
  modified_base (15)..(15): 2'-OMe-nucleotide
  modified_base (16)..(16): 2'-fluoro-nucleotide
  modified_base (17)..(17): 2'-OMe-nucleotide
  modified_base (18)..(18): 2'-fluoro-nucleotide
  modified_base (19)..(19): 2'-OMe-nucleotide
  modified_base (20)..(20): 2'-fluoro-nucleotide
  modified_base (21)..(21): 2'-OMe-nucleotide
  modified_base (22)..(22): 2'-fluoro-nucleotide
  modified_base (23)..(23): Inverted nucleotide
ccagguauuuuuguguauaagct

SEQ ID NO: 877 - DNA, 23 bp, Artificial Sequence
  source: /note="Description of Artificial Sequence: Synthetic oligonucleotide"
  source: /note="Description of Combined DNA/RNA Molecule: Synthetic oligonucleotide"
  modified_base (1)..(1): 2'-OMe-nucleotide
  modified_base (2)..(2): 2'-OMe-nucleotide
  modified_base (3)..(3): 2'-OMe-nucleotide
  modified_base (4)..(4): 2'-fluoro-nucleotide
  modified_base (5)..(5): 2'-OMe-nucleotide
  modified_base (6)..(6): 2'-fluoro-nucleotide
  modified_base (7)..(7): 2'-OMe-nucleotide
  modified_base (8)..(8): 2'-fluoro-nucleotide
  modified_base (9)..(9): 2'-OMe-nucleotide
  modified_base (10)..(10): 2'-fluoro-nucleotide
  modified_base (11)..(11): 2'-OMe-nucleotide
  modified_base (12)..(12): 2'-fluoro-nucleotide
  modified_base (13)..(13): 2'-OMe-nucleotide
  modified_base (14)..(14): 2'-fluoro-nucleotide
  modified_base (15)..(15): 2'-OMe-nucleotide
  modified_base (16)..(16): 2'-fluoro-nucleotide
  modified_base (17)..(17): 2'-OMe-nucleotide
  modified_base (18)..(18): 2'-fluoro-nucleotide
  modified_base (19)..(19): 2'-OMe-nucleotide
  modified_base (20)..(20): 2'-fluoro-nucleotide
  modified_base (21)..(21): 2'-OMe-nucleotide
  modified_base (22)..(22): 2'-fluoro-nucleotide
  modified_base (23)..(23): Inverted nucleotide
ccaguauuuuuguguauaagcut

SEQ ID NO: 878 - DNA, 23 bp, Artificial Sequence
  source: /note="Description of Artificial Sequence: Synthetic oligonucleotide"
  source: /note="Description of Combined DNA/RNA Molecule: Synthetic oligonucleotide"
  modified_base (1)..(1): 2'-OMe-nucleotide
  modified_base (2)..(2): 2'-OMe-nucleotide
  modified_base (3)..(3): 2'-OMe-nucleotide
  modified_base (4)..(4): 2'-fluoro-nucleotide
  modified_base (5)..(5): 2'-OMe-nucleotide
  modified_base (6)..(6): 2'-fluoro-nucleotide
  modified_base (7)..(7): 2'-OMe-nucleotide
  modified_base (8)..(8): 2'-fluoro-nucleotide
  modified_base (9)..(9): 2'-OMe-nucleotide
  modified_base (10)..(10): 2'-fluoro-nucleotide
  modified_base (11)..(11): 2'-OMe-nucleotide
  modified_base (12)..(12): 2'-fluoro-nucleotide
  modified_base (13)..(13): 2'-OMe-nucleotide
  modified_base (14)..(14): 2'-fluoro-nucleotide
  modified_base (15)..(15): 2'-OMe-nucleotide
  modified_base (16)..(16): 2'-fluoro-nucleotide
  modified_base (17)..(17): 2'-OMe-nucleotide
  modified_base (18)..(18): 2'-fluoro-nucleotide
  modified_base (19)..(19): 2'-OMe-nucleotide
  modified_base (20)..(20): 2'-fluoro-nucleotide
  modified_base (21)..(21): 2'-OMe-nucleotide
  modified_base (22)..(22): 2'-fluoro-nucleotide
  modified_base (23)..(23): Inverted nucleotide
ccauauuuuuguguauaagcuut

SEQ ID NO: 879 - DNA, 23 bp, Artificial Sequence
  source: /note="Description of Artificial Sequence: Synthetic oligonucleotide"
  source: /note="Description of Combined DNA/RNA Molecule: Synthetic oligonucleotide"
  modified_base (1)..(1): 2'-OMe-nucleotide
  modified_base (2)..(2): 2'-OMe-nucleotide
  modified_base (3)..(3): 2'-OMe-nucleotide
  modified_base (4)..(4): 2'-fluoro-nucleotide
  modified_base (5)..(5): 2'-OMe-nucleotide
  modified_base (6)..(6): 2'-fluoro-nucleotide
  modified_base (7)..(7): 2'-OMe-nucleotide
  modified_base (8)..(8): 2'-fluoro-nucleotide
  modified_base (9)..(9): 2'-OMe-nucleotide
  modified_base (10)..(10): 2'-fluoro-nucleotide
  modified_base (11)..(11): 2'-OMe-nucleotide
  modified_base (12)..(12): 2'-fluoro-nucleotide
  modified_base (13)..(13): 2'-OMe-nucleotide
  modified_base (14)..(14): 2'-fluoro-nucleotide
  modified_base (15)..(15): 2'-OMe-nucleotide
  modified_base (16)..(16): 2'-fluoro-nucleotide
  modified_base (17)..(17): 2'-OMe-nucleotide
  modified_base (18)..(18): 2'-fluoro-nucleotide
  modified_base (19)..(19): 2'-OMe-nucleotide
  modified_base (20)..(20): 2'-fluoro-nucleotide
  modified_base (21)..(21): 2'-OMe-nucleotide
  modified_base (22)..(22): 2'-fluoro-nucleotide
  modified_base (23)..(23): Inverted nucleotide
ccaauuuuuguguauaagcuuut

SEQ ID NO: 880 - DNA, 23 bp, Artificial Sequence
  source: /note="Description of Artificial Sequence: Synthetic oligonucleotide"
  source: /note="Description of Combined DNA/RNA Molecule: Synthetic oligonucleotide"
  modified_base (1)..(1): 2'-OMe-nucleotide
  modified_base (2)..(2): 2'-OMe-nucleotide
  modified_base (3)..(3): 2'-OMe-nucleotide
  modified_base (4)..(4): 2'-fluoro-nucleotide
  modified_base (5)..(5): 2'-OMe-nucleotide
  modified_base (6)..(6): 2'-fluoro-nucleotide
  modified_base (7)..(7): 2'-OMe-nucleotide
  modified_base (8)..(8): 2'-fluoro-nucleotide
  modified_base (9)..(9): 2'-OMe-nucleotide
  modified_base (10)..(10): 2'-fluoro-nucleotide
  modified_base (11)..(11): 2'-OMe-nucleotide
  modified_base (12)..(12): 2'-fluoro-nucleotide
  modified_base (13)..(13): 2'-OMe-nucleotide
  modified_base (14)..(14): 2'-fluoro-nucleotide
  modified_base (15)..(15): 2'-OMe-nucleotide
  modified_base (16)..(16): 2'-fluoro-nucleotide
  modified_base (17)..(17): 2'-OMe-nucleotide
  modified_base (18)..(18): 2'-fluoro-nucleotide
  modified_base (19)..(19): 2'-OMe-nucleotide
  modified_base (20)..(20): 2'-fluoro-nucleotide
  modified_base (21)..(21): 2'-OMe-nucleotide
  modified_base (22)..(22): 2'-fluoro-nucleotide
  modified_base (23)..(23): Inverted nucleotide
ccauuuuuguguauaagcuuuut

SEQ ID NO: 881 - DNA, 23 bp, Artificial Sequence
  source: /note="Description of Artificial Sequence: Synthetic oligonucleotide"
  source: /note="Description of Combined DNA/RNA Molecule: Synthetic oligonucleotide"
  modified_base (1)..(1): 2'-OMe-nucleotide
  modified_base (2)..(2): 2'-OMe-nucleotide
  modified_base (3)..(3): 2'-OMe-nucleotide
  modified_base (4)..(4): 2'-fluoro-nucleotide
  modified_base (5)..(5): 2'-OMe-nucleotide
  modified_base (6)..(6): 2'-fluoro-nucleotide
  modified_base (7)..(7): 2'-OMe-nucleotide
  modified_base (8)..(8): 2'-fluoro-nucleotide
  modified_base (9)..(9): 2'-OMe-nucleotide
  modified_base (10)..(10): 2'-fluoro-nucleotide
  modified_base (11)..(11): 2'-OMe-nucleotide
  modified_base (12)..(12): 2'-fluoro-nucleotide
  modified_base (13)..(13): 2'-OMe-nucleotide
  modified_base (14)..(14): 2'-fluoro-nucleotide
  modified_base (15)..(15): 2'-OMe-nucleotide
  modified_base (16)..(16): 2'-fluoro-nucleotide
  modified_base (17)..(17): 2'-OMe-nucleotide
  modified_base (18)..(18): 2'-fluoro-nucleotide
  modified_base (19)..(19): 2'-OMe-nucleotide
  modified_base (20)..(20): 2'-fluoro-nucleotide
  modified_base (21)..(21): 2'-OMe-nucleotide
  modified_base (22)..(22): 2'-fluoro-nucleotide
  modified_base (23)..(23): Inverted nucleotide
ccauguuaaaaauaaacucugct

SEQ ID NO: 882 - DNA, 23 bp, Artificial Sequence
  source: /note="Description of Artificial Sequence: Synthetic oligonucleotide"
  source: /note="Description of Combined DNA/RNA Molecule: Synthetic oligonucleotide"
  modified_base (1)..(1): 2'-OMe-nucleotide
  modified_base (2)..(2): 2'-OMe-nucleotide
  modified_base (3)..(3): 2'-OMe-nucleotide
  modified_base (4)..(4): 2'-fluoro-nucleotide
  modified_base (5)..(5): 2'-OMe-nucleotide
  modified_base (6)..(6): 2'-fluoro-nucleotide
  modified_base (7)..(7): 2'-OMe-nucleotide
  modified_base (8)..(8): 2'-fluoro-nucleotide
  modified_base (9)..(9): 2'-OMe-nucleotide
  modified_base (10)..(10): 2'-fluoro-nucleotide
  modified_base (11)..(11): 2'-OMe-nucleotide
  modified_base (12)..(12): 2'-fluoro-nucleotide
  modified_base (13)..(13): 2'-OMe-nucleotide
  modified_base (14)..(14): 2'-fluoro-nucleotide
  modified_base (15)..(15): 2'-OMe-nucleotide
  modified_base (16)..(16): 2'-fluoro-nucleotide
  modified_base (17)..(17): 2'-OMe-nucleotide
  modified_base (18)..(18): 2'-fluoro-nucleotide
  modified_base (19)..(19): 2'-OMe-nucleotide
  modified_base (20)..(20): 2'-fluoro-nucleotide
  modified_base (21)..(21): 2'-OMe-nucleotide
  modified_base (22)..(22): 2'-fluoro-nucleotide
  modified_base (23)..(23): Inverted nucleotide
ccaguuaaaaauaaacucugcat

SEQ ID NO: 883 - DNA, 23 bp, Artificial Sequence
  source: /note="Description of Artificial Sequence: Synthetic oligonucleotide"
  source: /note="Description of Combined DNA/RNA Molecule: Synthetic oligonucleotide"
  modified_base (1)..(1): 2'-OMe-nucleotide
  modified_base (2)..(2): 2'-OMe-nucleotide
  modified_base (3)..(3): 2'-OMe-nucleotide
  modified_base (4)..(4): 2'-fluoro-nucleotide
  modified_base (5)..(5): 2'-OMe-nucleotide
  modified_base (6)..(6): 2'-fluoro-nucleotide
  modified_base (7)..(7): 2'-OMe-nucleotide
  modified_base (8)..(8): 2'-fluoro-nucleotide
  modified_base (9)..(9): 2'-OMe-nucleotide
  modified_base (10)..(10): 2'-fluoro-nucleotide
  modified_base (11)..(11): 2'-OMe-nucleotide
  modified_base (12)..(12): 2'-fluoro-nucleotide
  modified_base (13)..(13): 2'-OMe-nucleotide
  modified_base (14)..(14): 2'-fluoro-nucleotide
  modified_base (15)..(15): 2'-OMe-nucleotide
  modified_base (16)..(16): 2'-fluoro-nucleotide
  modified_base (17)..(17): 2'-OMe-nucleotide
  modified_base (18)..(18): 2'-fluoro-nucleotide
  modified_base (19)..(19): 2'-OMe-nucleotide
  modified_base (20)..(20): 2'-fluoro-nucleotide
  modified_base (21)..(21): 2'-OMe-nucleotide
  modified_base (22)..(22): 2'-fluoro-nucleotide
  modified_base (23)..(23): Inverted nucleotide
ccauuaaaaauaaacucugcact

SEQ ID NO: 884 - DNA, 23 bp, Artificial Sequence
  source: /note="Description of Artificial Sequence: Synthetic oligonucleotide"
  source: /note="Description of Combined DNA/RNA Molecule: Synthetic oligonucleotide"
  modified_base (1)..(1): 2'-OMe-nucleotide
  modified_base (2)..(2): 2'-OMe-nucleotide
  modified_base (3)..(3): 2'-OMe-nucleotide
  modified_base (4)..(4): 2'-fluoro-nucleotide
  modified_base (5)..(5): 2'-OMe-nucleotide
  modified_base (6)..(6): 2'-fluoro-nucleotide
  modified_base (7)..(7): 2'-OMe-nucleotide
  modified_base (8)..(8): 2'-fluoro-nucleotide
  modified_base (9)..(9): 2'-OMe-nucleotide
  modified_base (10)..(10): 2'-fluoro-nucleotide
  modified_base (11)..(11): 2'-OMe-nucleotide
  modified_base (12)..(12): 2'-fluoro-nucleotide
  modified_base (13)..(13): 2'-OMe-nucleotide
  modified_base (14)..(14): 2'-fluoro-nucleotide
  modified_base (15)..(15): 2'-OMe-nucleotide
  modified_base (16)..(16): 2'-fluoro-nucleotide
  modified_base (17)..(17): 2'-OMe-nucleotide
  modified_base (18)..(18): 2'-fluoro-nucleotide
  modified_base (19)..(19): 2'-OMe-nucleotide
  modified_base (20)..(20): 2'-fluoro-nucleotide
  modified_base (21)..(21): 2'-OMe-nucleotide
  modified_base (22)..(22): 2'-fluoro-nucleotide
  modified_base (23)..(23): Inverted nucleotide
ccauaaaaauaaacucugcacut

SEQ ID NO: 885 - DNA, 23 bp, Artificial Sequence
  source: /note="Description of Artificial Sequence: Synthetic oligonucleotide"
  source: /note="Description of Combined DNA/RNA Molecule: Synthetic oligonucleotide"
  modified_base (1)..(1): 2'-OMe-nucleotide
  modified_base (2)..(2): 2'-OMe-nucleotide
  modified_base (3)..(3): 2'-OMe-nucleotide
  modified_base (4)..(4): 2'-fluoro-nucleotide
  modified_base (5)..(5): 2'-OMe-nucleotide
  modified_base (6)..(6): 2'-fluoro-nucleotide
  modified_base (7)..(7): 2'-OMe-nucleotide
  modified_base (8)..(8): 2'-fluoro-nucleotide
  modified_base (9)..(9): 2'-OMe-nucleotide
  modified_base (10)..(10): 2'-fluoro-nucleotide
  modified_base (11)..(11): 2'-OMe-nucleotide
  modified_base (12)..(12): 2'-fluoro-nucleotide
  modified_base (13)..(13): 2'-OMe-nucleotide
  modified_base (14)..(14): 2'-fluoro-nucleotide
  modified_base (15)..(15): 2'-OMe-nucleotide
  modified_base (16)..(16): 2'-fluoro-nucleotide
  modified_base (17)..(17): 2'-OMe-nucleotide
  modified_base (18)..(18): 2'-fluoro-nucleotide
  modified_base (19)..(19): 2'-OMe-nucleotide
  modified_base (20)..(20): 2'-fluoro-nucleotide
  modified_base (21)..(21): 2'-OMe-nucleotide
  modified_base (22)..(22): 2'-fluoro-nucleotide
  modified_base (23)..(23): Inverted nucleotide
ccaaaaaauaaacucugcacuut

SEQ ID NO: 886 - DNA, 23 bp, Artificial Sequence
  source: /note="Description of Artificial Sequence: Synthetic oligonucleotide"
  source: /note="Description of Combined DNA/RNA Molecule: Synthetic oligonucleotide"
  modified_base (1)..(1): 2'-OMe-nucleotide
  modified_base (2)..(2): 2'-OMe-nucleotide
  modified_base (3)..(3): 2'-OMe-nucleotide
  modified_base (4)..(4): 2'-fluoro-nucleotide
  modified_base (5)..(5): 2'-OMe-nucleotide
  modified_base (6)..(6): 2'-fluoro-nucleotide
  modified_base (7)..(7): 2'-OMe-nucleotide
  modified_base (8)..(8): 2'-fluoro-nucleotide
  modified_base (9)..(9): 2'-OMe-nucleotide
  modified_base (10)..(10): 2'-fluoro-nucleotide
  modified_base (11)..(11): 2'-OMe-nucleotide
  modified_base (12)..(12): 2'-fluoro-nucleotide
  modified_base (13)..(13): 2'-OMe-nucleotide
  modified_base (14)..(14): 2'-fluoro-nucleotide
  modified_base (15)..(15): 2'-OMe-nucleotide
  modified_base (16)..(16): 2'-fluoro-nucleotide
  modified_base (17)..(17): 2'-OMe-nucleotide
  modified_base (18)..(18): 2'-fluoro-nucleotide
  modified_base (19)..(19): 2'-OMe-nucleotide
  modified_base (20)..(20): 2'-fluoro-nucleotide
  modified_base (21)..(21): 2'-OMe-nucleotide
  modified_base (22)..(22): 2'-fluoro-nucleotide
  modified_base (23)..(23): Inverted nucleotide
ccaaaaauaaacucugcacuuat

SEQ ID NO: 887 - DNA, 23 bp, Artificial Sequence
  source: /note="Description of Artificial Sequence: Synthetic oligonucleotide"
  source: /note="Description of Combined DNA/RNA Molecule: Synthetic oligonucleotide"
  modified_base (1)..(1): 2'-OMe-nucleotide
  modified_base (2)..(2): 2'-OMe-nucleotide
  modified_base (3)..(3): 2'-OMe-nucleotide
  modified_base (4)..(4): 2'-fluoro-nucleotide
  modified_base (5)..(5): 2'-OMe-nucleotide
  modified_base (6)..(6): 2'-fluoro-nucleotide
  modified_base (7)..(7): 2'-OMe-nucleotide
  modified_base (8)..(8): 2'-fluoro-nucleotide
  modified_base (9)..(9): 2'-OMe-nucleotide
  modified_base (10)..(10): 2'-fluoro-nucleotide
  modified_base (11)..(11): 2'-OMe-nucleotide
  modified_base (12)..(12): 2'-fluoro-nucleotide
  modified_base (13)..(13): 2'-OMe-nucleotide
  modified_base (14)..(14): 2'-fluoro-nucleotide
  modified_base (15)..(15): 2'-OMe-nucleotide
  modified_base (16)..(16): 2'-fluoro-nucleotide
  modified_base (17)..(17): 2'-OMe-nucleotide
  modified_base (18)..(18): 2'-fluoro-nucleotide
  modified_base (19)..(19): 2'-OMe-nucleotide
  modified_base (20)..(20): 2'-fluoro-nucleotide
  modified_base (21)..(21): 2'-OMe-nucleotide
  modified_base (22)..(22): 2'-fluoro-nucleotide
  modified_base (23)..(23): Inverted nucleotide
ccaaaauaaacucugcacuuaut

SEQ ID NO: 888 - DNA, 23 bp, Artificial Sequence
  source: /note="Description of Artificial Sequence: Synthetic oligonucleotide"
  source: /note="Description of Combined DNA/RNA Molecule: Synthetic oligonucleotide"
  modified_base (1)..(1): 2'-OMe-nucleotide
  modified_base (2)..(2): 2'-OMe-nucleotide
  modified_base (3)..(3): 2'-OMe-nucleotide
  modified_base (4)..(4): 2'-fluoro-nucleotide
  modified_base (5)..(5): 2'-OMe-nucleotide
  modified_base (6)..(6): 2'-fluoro-nucleotide
  modified_base (7)..(7): 2'-OMe-nucleotide
  modified_base (8)..(8): 2'-fluoro-nucleotide
  modified_base (9)..(9): 2'-OMe-nucleotide
  modified_base (10)..(10): 2'-fluoro-nucleotide
  modified_base (11)..(11): 2'-OMe-nucleotide
  modified_base (12)..(12): 2'-fluoro-nucleotide
  modified_base (13)..(13): 2'-OMe-nucleotide
  modified_base (14)..(14): 2'-fluoro-nucleotide
  modified_base (15)..(15): 2'-OMe-nucleotide
  modified_base (16)..(16): 2'-fluoro-nucleotide
  modified_base (17)..(17): 2'-OMe-nucleotide
  modified_base (18)..(18): 2'-fluoro-nucleotide
  modified_base (19)..(19): 2'-OMe-nucleotide
  modified_base (20)..(20): 2'-fluoro-nucleotide
  modified_base (21)..(21): 2'-OMe-nucleotide
  modified_base (22)..(22): 2'-fluoro-nucleotide
  modified_base (23)..(23): Inverted nucleotide
ccaaauaaacucugcacuuauut

SEQ ID NO: 889 - DNA, 23 bp, Artificial Sequence
  source: /note="Description of Artificial Sequence: Synthetic oligonucleotide"
  source: /note="Description of Combined DNA/RNA Molecule: Synthetic oligonucleotide"
  modified_base (1)..(1): 2'-OMe-nucleotide
  modified_base (2)..(2): 2'-OMe-nucleotide
  modified_base (3)..(3): 2'-OMe-nucleotide
  modified_base (4)..(4): 2'-fluoro-nucleotide
  modified_base (5)..(5): 2'-OMe-nucleotide
  modified_base (6)..(6): 2'-fluoro-nucleotide
  modified_base (7)..(7): 2'-OMe-nucleotide
  modified_base (8)..(8): 2'-fluoro-nucleotide
  modified_base (9)..(9): 2'-OMe-nucleotide
  modified_base (10)..(10): 2'-fluoro-nucleotide
  modified_base (11)..(11): 2'-OMe-nucleotide
  modified_base (12)..(12): 2'-fluoro-nucleotide
  modified_base (13)..(13): 2'-OMe-nucleotide
  modified_base (14)..(14): 2'-fluoro-nucleotide
  modified_base (15)..(15): 2'-OMe-nucleotide
  modified_base (16)..(16): 2'-fluoro-nucleotide
  modified_base (17)..(17): 2'-OMe-nucleotide
  modified_base (18)..(18): 2'-fluoro-nucleotide
  modified_base (19)..(19): 2'-OMe-nucleotide
  modified_base (20)..(20): 2'-fluoro-nucleotide
  modified_base (21)..(21): 2'-OMe-nucleotide
  modified_base (22)..(22): 2'-fluoro-nucleotide
  modified_base (23)..(23): Inverted nucleotide
ccaauaaacucugcacuuauuut

SEQ ID NO: 890 - DNA, 23 bp, Artificial Sequence
  source: /note="Description of Artificial Sequence: Synthetic oligonucleotide"
  source: /note="Description of Combined DNA/RNA Molecule: Synthetic oligonucleotide"
  modified_base (1)..(1): 2'-OMe-nucleotide
  modified_base (2)..(2): 2'-OMe-nucleotide
  modified_base (3)..(3): 2'-OMe-nucleotide
  modified_base (4)..(4): 2'-fluoro-nucleotide
  modified_base (5)..(5): 2'-OMe-nucleotide
  modified_base (6)..(6): 2'-fluoro-nucleotide
  modified_base (7)..(7): 2'-OMe-nucleotide
  modified_base (8)..(8): 2'-fluoro-nucleotide
  modified_base (9)..(9): 2'-OMe-nucleotide
  modified_base (10)..(10): 2'-fluoro-nucleotide
  modified_base (11)..(11): 2'-OMe-nucleotide
  modified_base (12)..(12): 2'-fluoro-nucleotide
  modified_base (13)..(13): 2'-OMe-nucleotide
  modified_base (14)..(14): 2'-fluoro-nucleotide
  modified_base (15)..(15): 2'-OMe-nucleotide
  modified_base (16)..(16): 2'-fluoro-nucleotide
  modified_base (17)..(17): 2'-OMe-nucleotide
  modified_base (18)..(18): 2'-fluoro-nucleotide
  modified_base (19)..(19): 2'-OMe-nucleotide
  modified_base (20)..(20): 2'-fluoro-nucleotide
  modified_base (21)..(21): 2'-OMe-nucleotide
  modified_base (22)..(22): 2'-fluoro-nucleotide
  modified_base (23)..(23): Inverted nucleotide
ccauaaacucugcacuuauuuut

SEQ ID NO: 891 - DNA, 23 bp, Artificial Sequence
  source: /note="Description of Artificial Sequence: Synthetic oligonucleotide"
  source: /note="Description of Combined DNA/RNA Molecule: Synthetic oligonucleotide"
  modified_base (1)..(1): 2'-OMe-nucleotide
  modified_base (2)..(2): 2'-OMe-nucleotide
  modified_base (3)..(3): 2'-OMe-nucleotide
  modified_base (4)..(4): 2'-fluoro-nucleotide
  modified_base (5)..(5): 2'-OMe-nucleotide
  modified_base (6)..(6): 2'-fluoro-nucleotide
  modified_base (7)..(7): 2'-OMe-nucleotide
  modified_base (8)..(8): 2'-fluoro-nucleotide
  modified_base (9)..(9): 2'-OMe-nucleotide
  modified_base (10)..(10): 2'-fluoro-nucleotide
  modified_base (11)..(11): 2'-OMe-nucleotide
  modified_base (12)..(12): 2'-fluoro-nucleotide
  modified_base (13)..(13): 2'-OMe-nucleotide
  modified_base (14)..(14): 2'-fluoro-nucleotide
  modified_base (15)..(15): 2'-OMe-nucleotide
  modified_base (16)..(16): 2'-fluoro-nucleotide
  modified_base (17)..(17): 2'-OMe-nucleotide
  modified_base (18)..(18): 2'-fluoro-nucleotide
  modified_base (19)..(19): 2'-OMe-nucleotide
  modified_base (20)..(20): 2'-fluoro-nucleotide
  modified_base (21)..(21): 2'-OMe-nucleotide
  modified_base (22)..(22): 2'-fluoro-nucleotide
  modified_base (23)..(23): Inverted nucleotide
ccaaaacucugcacuuauuuugt

SEQ ID NO: 892 - DNA, 23 bp, Artificial Sequence
  source: /note="Description of Artificial Sequence: Synthetic oligonucleotide"
  source: /note="Description of Combined DNA/RNA Molecule: Synthetic oligonucleotide"
  modified_base (1)..(1): 2'-OMe-nucleotide
  modified_base (2)..(2): 2'-OMe-nucleotide
  modified_base (3)..(3): 2'-OMe-nucleotide
  modified_base (4)..(4): 2'-fluoro-nucleotide
  modified_base (5)..(5): 2'-OMe-nucleotide
  modified_base (6)..(6): 2'-fluoro-nucleotide
  modified_base (7)..(7): 2'-OMe-nucleotide
  modified_base (8)..(8): 2'-fluoro-nucleotide
  modified_base (9)..(9): 2'-OMe-nucleotide
  modified_base (10)..(10): 2'-fluoro-nucleotide
  modified_base (11)..(11): 2'-OMe-nucleotide
  modified_base (12)..(12): 2'-fluoro-nucleotide
  modified_base (13)..(13): 2'-OMe-nucleotide
  modified_base (14)..(14): 2'-fluoro-nucleotide
  modified_base (15)..(15): 2'-OMe-nucleotide
  modified_base (16)..(16): 2'-fluoro-nucleotide
  modified_base (17)..(17): 2'-OMe-nucleotide
  modified_base (18)..(18): 2'-fluoro-nucleotide
  modified_base (19)..(19): 2'-OMe-nucleotide
  modified_base (20)..(20): 2'-fluoro-nucleotide
  modified_base (21)..(21): 2'-OMe-nucleotide
  modified_base (22)..(22): 2'-fluoro-nucleotide
  modified_base (23)..(23): Inverted nucleotide
ccaaacucugcacuuauuuugat

SEQ ID NO: 893 - DNA, 23 bp, Artificial Sequence
  source: /note="Description of Artificial Sequence: Synthetic oligonucleotide"
  source: /note="Description of Combined DNA/RNA Molecule: Synthetic oligonucleotide"
  modified_base (1)..(1): 2'-OMe-nucleotide
  modified_base (2)..(2): 2'-OMe-nucleotide
  modified_base (3)..(3): 2'-OMe-nucleotide
  modified_base (4)..(4): 2'-fluoro-nucleotide
  modified_base (5)..(5): 2'-OMe-nucleotide
  modified_base (6)..(6): 2'-fluoro-nucleotide
  modified_base (7)..(7): 2'-OMe-nucleotide
  modified_base (8)..(8): 2'-fluoro-nucleotide
  modified_base (9)..(9): 2'-OMe-nucleotide
  modified_base (10)..(10): 2'-fluoro-nucleotide
  modified_base (11)..(11): 2'-OMe-nucleotide
  modified_base (12)..(12): 2'-fluoro-nucleotide
  modified_base (13)..(13): 2'-OMe-nucleotide
  modified_base (14)..(14): 2'-fluoro-nucleotide
  modified_base (15)..(15): 2'-OMe-nucleotide
  modified_base (16)..(16): 2'-fluoro-nucleotide
  modified_base (17)..(17): 2'-OMe-nucleotide
  modified_base (18)..(18): 2'-fluoro-nucleotide
  modified_base (19)..(19): 2'-OMe-nucleotide
  modified_base (20)..(20): 2'-fluoro-nucleotide
  modified_base (21)..(21): 2'-OMe-nucleotide
  modified_base (22)..(22): 2'-fluoro-nucleotide
  modified_base (23)..(23): Inverted nucleotide
ccaacucugcacuuauuuugaut

SEQ ID NO: 894 - DNA, 23 bp, Artificial Sequence
  source: /note="Description of Artificial Sequence: Synthetic oligonucleotide"
  source: /note="Description of Combined DNA/RNA Molecule: Synthetic oligonucleotide"
  modified_base (1)..(1): 2'-OMe-nucleotide
  modified_base (2)..(2): 2'-OMe-nucleotide
  modified_base (3)..(3): 2'-OMe-nucleotide
  modified_base (4)..(4): 2'-fluoro-nucleotide
  modified_base (5)..(5): 2'-OMe-nucleotide
  modified_base (6)..(6): 2'-fluoro-nucleotide
  modified_base (7)..(7): 2'-OMe-nucleotide
  modified_base (8)..(8): 2'-fluoro-nucleotide
  modified_base (9)..(9): 2'-OMe-nucleotide
  modified_base (10)..(10): 2'-fluoro-nucleotide
  modified_base (11)..(11): 2'-OMe-nucleotide
  modified_base (12)..(12): 2'-fluoro-nucleotide
  modified_base (13)..(13): 2'-OMe-nucleotide
  modified_base (14)..(14): 2'-fluoro-nucleotide
  modified_base (15)..(15): 2'-OMe-nucleotide
  modified_base (16)..(16): 2'-fluoro-nucleotide
  modified_base (17)..(17): 2'-OMe-nucleotide
  modified_base (18)..(18): 2'-fluoro-nucleotide
  modified_base (19)..(19): 2'-OMe-nucleotide
  modified_base (20)..(20): 2'-fluoro-nucleotide
  modified_base (21)..(21): 2'-OMe-nucleotide
  modified_base (22)..(22): 2'-fluoro-nucleotide
  modified_base (23)..(23): Inverted nucleotide
ccacucugcacuuauuuugauut

SEQ ID NO: 895 - DNA, 23 bp, Artificial Sequence
  source: /note="Description of Artificial Sequence: Synthetic oligonucleotide"
  source: /note="Description of Combined DNA/RNA Molecule: Synthetic oligonucleotide"
  modified_base (1)..(1): 2'-OMe-nucleotide
  modified_base (2)..(2): 2'-OMe-nucleotide
  modified_base (3)..(3): 2'-OMe-nucleotide
  modified_base (4)..(4): 2'-fluoro-nucleotide
  modified_base (5)..(5): 2'-OMe-nucleotide
  modified_base (6)..(6): 2'-fluoro-nucleotide
  modified_base (7)..(7): 2'-OMe-nucleotide
  modified_base (8)..(8): 2'-fluoro-nucleotide
  modified_base (9)..(9): 2'-OMe-nucleotide
  modified_base (10)..(10): 2'-fluoro-nucleotide
  modified_base (11)..(11): 2'-OMe-nucleotide
  modified_base (12)..(12): 2'-fluoro-nucleotide
  modified_base (13)..(13): 2'-OMe-nucleotide
  modified_base (14)..(14): 2'-fluoro-nucleotide
  modified_base (15)..(15): 2'-OMe-nucleotide
  modified_base (16)..(16): 2'-fluoro-nucleotide
  modified_base (17)..(17): 2'-OMe-nucleotide
  modified_base (18)..(18): 2'-fluoro-nucleotide
  modified_base (19)..(19): 2'-OMe-nucleotide
  modified_base (20)..(20): 2'-fluoro-nucleotide
  modified_base (21)..(21): 2'-OMe-nucleotide
  modified_base (22)..(22): 2'-fluoro-nucleotide
  modified_base (23)..(23): Inverted nucleotide
ccaucugcacuuauuuugauuut

SEQ ID NO: 896 - DNA, 23 bp, Artificial Sequence
  source: /note="Description of Artificial Sequence: Synthetic oligonucleotide"
  source: /note="Description of Combined DNA/RNA Molecule: Synthetic oligonucleotide"
  modified_base (1)..(1): 2'-OMe-nucleotide
  modified_base (2)..(2): 2'-OMe-nucleotide
  modified_base (3)..(3): 2'-OMe-nucleotide
  modified_base (4)..(4): 2'-fluoro-nucleotide
  modified_base (5)..(5): 2'-OMe-nucleotide
  modified_base (6)..(6): 2'-fluoro-nucleotide
  modified_base (7)..(7): 2'-OMe-nucleotide
  modified_base (8)..(8): 2'-fluoro-nucleotide
  modified_base (9)..(9): 2'-OMe-nucleotide
  modified_base (10)..(10): 2'-fluoro-nucleotide
  modified_base (11)..(11): 2'-OMe-nucleotide
  modified_base (12)..(12): 2'-fluoro-nucleotide
  modified_base (13)..(13): 2'-OMe-nucleotide
  modified_base (14)..(14): 2'-fluoro-nucleotide
  modified_base (15)..(15): 2'-OMe-nucleotide
  modified_base (16)..(16): 2'-fluoro-nucleotide
  modified_base (17)..(17): 2'-OMe-nucleotide
  modified_base (18)..(18): 2'-fluoro-nucleotide
  modified_base (19)..(19): 2'-OMe-nucleotide
  modified_base (20)..(20): 2'-fluoro-nucleotide
  modified_base (21)..(21): 2'-OMe-nucleotide
  modified_base (22)..(22): 2'-fluoro-nucleotide
  modified_base (23)..(23): Inverted nucleotide
ccacugcacuuauuuugauuugt

SEQ ID NO: 897 - DNA, 23 bp, Artificial Sequence
  source: /note="Description of Artificial Sequence: Synthetic oligonucleotide"
  source: /note="Description of Combined DNA/RNA Molecule: Synthetic oligonucleotide"
  modified_base (1)..(1): 2'-OMe-nucleotide
  modified_base (2)..(2): 2'-OMe-nucleotide
  modified_base (3)..(3): 2'-OMe-nucleotide
  modified_base (4)..(4): 2'-fluoro-nucleotide
  modified_base (5)..(5): 2'-OMe-nucleotide
  modified_base (6)..(6): 2'-fluoro-nucleotide
  modified_base (7)..(7): 2'-OMe-nucleotide
  modified_base (8)..(8): 2'-fluoro-nucleotide
  modified_base (9)..(9): 2'-OMe-nucleotide
  modified_base (10)..(10): 2'-fluoro-nucleotide
  modified_base (11)..(11): 2'-OMe-nucleotide
  modified_base (12)..(12): 2'-fluoro-nucleotide
  modified_base (13)..(13): 2'-OMe-nucleotide
  modified_base (14)..(14): 2'-fluoro-nucleotide
  modified_base (15)..(15): 2'-OMe-nucleotide
  modified_base (16)..(16): 2'-fluoro-nucleotide
  modified_base (17)..(17): 2'-OMe-nucleotide
  modified_base (18)..(18): 2'-fluoro-nucleotide
  modified_base (19)..(19): 2'-OMe-nucleotide
  modified_base (20)..(20): 2'-fluoro-nucleotide
  modified_base (21)..(21): 2'-OMe-nucleotide
  modified_base (22)..(22): 2'-fluoro-nucleotide
  modified_base (23)..(23): Inverted nucleotide
ccaugcacuuauuuugauuugat

SEQ ID NO: 898 - DNA, 21 bp, Artificial Sequence
  source: /note="Description of Artificial Sequence: Synthetic oligonucleotide"
  source: /note="Description of Combined DNA/RNA Molecule: Synthetic oligonucleotide"
  modified_base (1)..(1): 2'-fluoro-nucleotide
  modified_base (2)..(2): 2'-fluoro-nucleotide
  modified_base (3)..(3): 2'-OMe-nucleotide
  modified_base (4)..(4): 2'-fluoro-nucleotide
  modified_base (5)..(5): 2'-OMe-nucleotide
  modified_base (6)..(6): 2'-fluoro-nucleotide
  modified_base (7)..(7): 2'-OMe-nucleotide
  modified_base (8)..(8): 2'-fluoro-nucleotide
  modified_base (9)..(9): 2'-OMe-nucleotide
  modified_base (10)..(10): 2'-fluoro-nucleotide
  modified_base (11)..(11): 2'-OMe-nucleotide
  modified_base (12)..(12): 2'-fluoro-nucleotide
  modified_base (13)..(13): 2'-OMe-nucleotide
  modified_base (14)..(14): 2'-fluoro-nucleotide
  modified_base (15)..(15): 2'-OMe-nucleotide
  modified_base (16)..(16): 2'-fluoro-nucleotide
  modified_base (17)..(17): 2'-OMe-nucleotide
  modified_base (18)..(18): 2'-fluoro-nucleotide
  modified_base (19)..(19): 2'-OMe-nucleotide
  modified_base (20)..(20): dT
  modified_base (21)..(21): dT
gaaagccagccccaaaggutt

SEQ ID NO: 899 - DNA, 21 bp, Artificial Sequence
  source: /note="Description of Artificial Sequence: Synthetic oligonucleotide"
  source: /note="Description of Combined DNA/RNA Molecule: Synthetic oligonucleotide"
  modified_base (1)..(1): 2'-fluoro-nucleotide
  modified_base (2)..(2): 2'-fluoro-nucleotide
  modified_base (3)..(3): 2'-OMe-nucleotide
  modified_base (4)..(4): 2'-fluoro-nucleotide
  modified_base (5)..(5): 2'-OMe-nucleotide
  modified_base (6)..(6): 2'-fluoro-nucleotide
  modified_base (7)..(7): 2'-OMe-nucleotide
  modified_base (8)..(8): 2'-fluoro-nucleotide
  modified_base (9)..(9): 2'-OMe-nucleotide
  modified_base (10)..(10): 2'-fluoro-nucleotide
  modified_base (11)..(11): 2'-OMe-nucleotide
  modified_base (12)..(12): 2'-fluoro-nucleotide
  modified_base (13)..(13): 2'-OMe-nucleotide
  modified_base (14)..(14): 2'-fluoro-nucleotide
  modified_base (15)..(15): 2'-OMe-nucleotide
  modified_base (16)..(16): 2'-fluoro-nucleotide
  modified_base (17)..(17): 2'-OMe-nucleotide
  modified_base (18)..(18): 2'-fluoro-nucleotide
  modified_base (19)..(19): 2'-OMe-nucleotide
  modified_base (20)..(20): dT
  modified_base (21)..(21): dT
caauccuggaccacauggctt

SEQ ID NO: 900 - DNA, 21 bp, Artificial Sequence
  source: /note="Description of Artificial Sequence: Synthetic oligonucleotide"
  source: /note="Description of Combined DNA/RNA Molecule: Synthetic oligonucleotide"
  modified_base (1)..(1): 2'-fluoro-nucleotide
  modified_base (2)..(2): 2'-fluoro-nucleotide
  modified_base (3)..(3): 2'-OMe-nucleotide
  modified_base (4)..(4): 2'-fluoro-nucleotide
  modified_base (5)..(5): 2'-OMe-nucleotide
  modified_base (6)..(6): 2'-fluoro-nucleotide
  modified_base (7)..(7): 2'-OMe-nucleotide
  modified_base (8)..(8): 2'-fluoro-nucleotide
  modified_base (9)..(9): 2'-OMe-nucleotide
  modified_base (10)..(10): 2'-fluoro-nucleotide
  modified_base (11)..(11): 2'-OMe-nucleotide
  modified_base (12)..(12): 2'-fluoro-nucleotide
  modified_base (13)..(13): 2'-OMe-nucleotide
  modified_base (14)..(14): 2'-fluoro-nucleotide
  modified_base (15)..(15): 2'-OMe-nucleotide
  modified_base (16)..(16): 2'-fluoro-nucleotide
  modified_base (17)..(17): 2'-OMe-nucleotide
  modified_base (18)..(18): 2'-fluoro-nucleotide
  modified_base (19)..(19): 2'-OMe-nucleotide
  modified_base (20)..(20): dT
  modified_base (21)..(21): dT
cgugccucgauaacucugutt

SEQ ID NO: 901 - DNA, 21 bp, Artificial Sequence
  source: /note="Description of Artificial Sequence: Synthetic oligonucleotide"
  source: /note="Description of Combined DNA/RNA Molecule: Synthetic oligonucleotide"
  modified_base (1)..(1): 2'-fluoro-nucleotide
  modified_base (2)..(2): 2'-fluoro-nucleotide
  modified_base (3)..(3): 2'-OMe-nucleotide
  modified_base (4)..(4): 2'-fluoro-nucleotide
  modified_base (5)..(5): 2'-OMe-nucleotide
  modified_base (6)..(6): 2'-fluoro-nucleotide
  modified_base (7)..(7): 2'-OMe-nucleotide
  modified_base (8)..(8): 2'-fluoro-nucleotide
  modified_base (9)..(9): 2'-OMe-nucleotide
  modified_base (10)..(10): 2'-fluoro-nucleotide
  modified_base (11)..(11): 2'-OMe-nucleotide
  modified_base (12)..(12): 2'-fluoro-nucleotide
  modified_base (13)..(13): 2'-OMe-nucleotide
  modified_base (14)..(14): 2'-fluoro-nucleotide
  modified_base (15)..(15): 2'-OMe-nucleotide
  modified_base (16)..(16): 2'-fluoro-nucleotide
  modified_base (17)..(17): 2'-OMe-nucleotide
  modified_base (18)..(18): 2'-fluoro-nucleotide
  modified_base (19)..(19): 2'-OMe-nucleotide
  modified_base (20)..(20): dT
  modified_base (21)..(21): dT
acgugccucgauaacucugtt

SEQ ID NO: 902 - DNA, 21 bp, Artificial Sequence
  source: /note="Description of Artificial Sequence: Synthetic oligonucleotide"
  source: /note="Description of Combined DNA/RNA Molecule: Synthetic oligonucleotide"
  modified_base (1)..(1): 2'-fluoro-nucleotide
  modified_base (2)..(2): 2'-fluoro-nucleotide
  modified_base (3)..(3): 2'-OMe-nucleotide
  modified_base (4)..(4): 2'-fluoro-nucleotide
  modified_base (5)..(5): 2'-OMe-nucleotide
  modified_base (6)..(6): 2'-fluoro-nucleotide
  modified_base (7)..(7): 2'-OMe-nucleotide
  modified_base (8)..(8): 2'-fluoro-nucleotide
  modified_base (9)..(9): 2'-OMe-nucleotide
  modified_base (10)..(10): 2'-fluoro-nucleotide
  modified_base (11)..(11): 2'-OMe-nucleotide
  modified_base (12)..(12): 2'-fluoro-nucleotide
  modified_base (13)..(13): 2'-OMe-nucleotide
  modified_base (14)..(14): 2'-fluoro-nucleotide
  modified_base (15)..(15): 2'-OMe-nucleotide
  modified_base (16)..(16): 2'-fluoro-nucleotide
  modified_base (17)..(17): 2'-OMe-nucleotide
  modified_base (18)..(18): 2'-fluoro-nucleotide
  modified_base (19)..(19): 2'-OMe-nucleotide
  modified_base (20)..(20): dT
  modified_base (21)..(21): dT
uacgugccucgauaacucutt

SEQ ID NO: 903 - DNA, 21 bp, Artificial Sequence
  source: /note="Description of Artificial Sequence: Synthetic oligonucleotide"
  source: /note="Description of Combined DNA/RNA Molecule: Synthetic oligonucleotide"
  modified_base (1)..(1): 2'-fluoro-nucleotide
  modified_base (2)..(2): 2'-fluoro-nucleotide
  modified_base (3)..(3): 2'-OMe-nucleotide
  modified_base (4)..(4): 2'-fluoro-nucleotide
  modified_base (5)..(5): 2'-OMe-nucleotide
  modified_base (6)..(6): 2'-fluoro-nucleotide
  modified_base (7)..(7): 2'-OMe-nucleotide
  modified_base (8)..(8): 2'-fluoro-nucleotide
  modified_base (9)..(9): 2'-OMe-nucleotide
  modified_base (10)..(10): 2'-fluoro-nucleotide
  modified_base (11)..(11): 2'-OMe-nucleotide
  modified_base (12)..(12): 2'-fluoro-nucleotide
  modified_base (13)..(13): 2'-OMe-nucleotide
  modified_base (14)..(14): 2'-fluoro-nucleotide
  modified_base (15)..(15): 2'-OMe-nucleotide
  modified_base (16)..(16): 2'-fluoro-nucleotide
  modified_base (17)..(17): 2'-OMe-nucleotide
  modified_base (18)..(18): 2'-fluoro-nucleotide
  modified_base (19)..(19): 2'-OMe-nucleotide
  modified_base (20)..(20): dT
  modified_base (21)..(21): dT
guacgugccucgauaacuctt

SEQ ID NO: 904 - DNA, 21 bp, Artificial Sequence
  source: /note="Description of Artificial Sequence: Synthetic oligonucleotide"
  source: /note="Description of Combined DNA/RNA Molecule: Synthetic oligonucleotide"
  modified_base (1)..(1): 2'-fluoro-nucleotide
  modified_base (2)..(2): 2'-fluoro-nucleotide
  modified_base (3)..(3): 2'-OMe-nucleotide
  modified_base (4)..(4): 2'-fluoro-nucleotide
  modified_base (5)..(5): 2'-OMe-nucleotide
  modified_base (6)..(6): 2'-fluoro-nucleotide
  modified_base (7)..(7): 2'-OMe-nucleotide
  modified_base (8)..(8): 2'-fluoro-nucleotide
  modified_base (9)..(9): 2'-OMe-nucleotide
  modified_base (10)..(10): 2'-fluoro-nucleotide
  modified_base (11)..(11): 2'-OMe-nucleotide
  modified_base (12)..(12): 2'-fluoro-nucleotide
  modified_base (13)..(13): 2'-OMe-nucleotide
  modified_base (14)..(14): 2'-fluoro-nucleotide
  modified_base (15)..(15): 2'-OMe-nucleotide
  modified_base (16)..(16): 2'-fluoro-nucleotide
  modified_base (17)..(17): 2'-OMe-nucleotide
  modified_base (18)..(18): 2'-fluoro-nucleotide
  modified_base (19)..(19): 2'-OMe-nucleotide
  modified_base (20)..(20): dT
  modified_base (21)..(21): dT
aguacgugccucgauaacutt

SEQ ID NO: 905 - DNA, 21 bp, Artificial Sequence
  source: /note="Description of Artificial Sequence: Synthetic oligonucleotide"
  source: /note="Description of Combined DNA/RNA Molecule: Synthetic oligonucleotide"
  modified_base (1)..(1): 2'-fluoro-nucleotide
  modified_base (2)..(2): 2'-fluoro-nucleotide
  modified_base (3)..(3): 2'-OMe-nucleotide
  modified_base (4)..(4): 2'-fluoro-nucleotide
  modified_base (5)..(5): 2'-OMe-nucleotide
  modified_base (6)..(6): 2'-fluoro-nucleotide
  modified_base (7)..(7): 2'-OMe-nucleotide
  modified_base (8)..(8): 2'-fluoro-nucleotide
  modified_base (9)..(9): 2'-OMe-nucleotide
  modified_base (10)..(10): 2'-fluoro-nucleotide
  modified_base (11)..(11): 2'-OMe-nucleotide
  modified_base (12)..(12): 2'-fluoro-nucleotide
  modified_base (13)..(13): 2'-OMe-nucleotide
  modified_base (14)..(14): 2'-fluoro-nucleotide
  modified_base (15)..(15): 2'-OMe-nucleotide
  modified_base (16)..(16): 2'-fluoro-nucleotide
  modified_base (17)..(17): 2'-OMe-nucleotide
  modified_base (18)..(18): 2'-fluoro-nucleotide
  modified_base (19)..(19): 2'-OMe-nucleotide
  modified_base (20)..(20): dT
  modified_base (21)..(21): dT
cugugacagugguggaguatt

SEQ ID NO: 906 - DNA, 21 bp, Artificial Sequence
  source: /note="Description of Artificial Sequence: Synthetic oligonucleotide"
  source: /note="Description of Combined DNA/RNA Molecule: Synthetic oligonucleotide"
  modified_base (1)..(1): 2'-fluoro-nucleotide
  modified_base (2)..(2): 2'-fluoro-nucleotide
  modified_base (3)..(3): 2'-OMe-nucleotide
  modified_base (4)..(4): 2'-fluoro-nucleotide
  modified_base (5)..(5): 2'-OMe-nucleotide
  modified_base (6)..(6): 2'-fluoro-nucleotide
  modified_base (7)..(7): 2'-OMe-nucleotide
  modified_base (8)..(8): 2'-fluoro-nucleotide
  modified_base (9)..(9): 2'-OMe-nucleotide
  modified_base (10)..(10): 2'-fluoro-nucleotide
  modified_base (11)..(11): 2'-OMe-nucleotide
  modified_base (12)..(12): 2'-fluoro-nucleotide
  modified_base (13)..(13): 2'-OMe-nucleotide
  modified_base (14)..(14): 2'-fluoro-nucleotide
  modified_base (15)..(15): 2'-OMe-nucleotide
  modified_base (16)..(16): 2'-fluoro-nucleotide
  modified_base (17)..(17): 2'-OMe-nucleotide
  modified_base (18)..(18): 2'-fluoro-nucleotide
  modified_base (19)..(19): 2'-OMe-nucleotide
  modified_base (20)..(20): dT
  modified_base (21)..(21): dT
uccugugacagugguggagtt

SEQ ID NO: 907 - DNA, 21 bp, Artificial Sequence
  source: /note="Description of Artificial Sequence: Synthetic oligonucleotide"
  source: /note="Description of Combined DNA/RNA Molecule: Synthetic oligonucleotide"
  modified_base (1)..(1): 2'-fluoro-nucleotide
  modified_base (2)..(2): 2'-fluoro-nucleotide
  modified_base (3)..(3): 2'-OMe-nucleotide
  modified_base (4)..(4): 2'-fluoro-nucleotide
  modified_base (5)..(5): 2'-OMe-nucleotide
  modified_base (6)..(6): 2'-fluoro-nucleotide
  modified_base (7)..(7): 2'-OMe-nucleotide
  modified_base (8)..(8): 2'-fluoro-nucleotide
  modified_base (9)..(9): 2'-OMe-nucleotide
  modified_base (10)..(10): 2'-fluoro-nucleotide
  modified_base (11)..(11): 2'-OMe-nucleotide
  modified_base (12)..(12): 2'-fluoro-nucleotide
  modified_base (13)..(13): 2'-OMe-nucleotide
  modified_base (14)..(14): 2'-fluoro-nucleotide
  modified_base (15)..(15): 2'-OMe-nucleotide
  modified_base (16)..(16): 2'-fluoro-nucleotide
  modified_base (17)..(17): 2'-OMe-nucleotide
  modified_base (18)..(18): 2'-fluoro-nucleotide
  modified_base (19)..(19): 2'-OMe-nucleotide
  modified_base (20)..(20): dT
  modified_base (21)..(21): dT
accaagcuuggcagguccutt

SEQ ID NO: 908 - DNA, 21 bp, Artificial Sequence
  source: /note="Description of Artificial Sequence: Synthetic oligonucleotide"
  source: /note="Description of Combined DNA/RNA Molecule: Synthetic oligonucleotide"
  modified_base (1)..(1): 2'-fluoro-nucleotide
  modified_base (2)..(2): 2'-fluoro-nucleotide
  modified_base (3)..(3): 2'-OMe-nucleotide
  modified_base (4)..(4): 2'-fluoro-nucleotide
  modified_base (5)..(5): 2'-OMe-nucleotide
  modified_base (6)..(6): 2'-fluoro-nucleotide
  modified_base (7)..(7): 2'-OMe-nucleotide
  modified_base (8)..(8): 2'-fluoro-nucleotide
  modified_base (9)..(9): 2'-OMe-nucleotide
  modified_base (10)..(10): 2'-fluoro-nucleotide
  modified_base (11)..(11): 2'-OMe-nucleotide
  modified_base (12)..(12): 2'-fluoro-nucleotide
  modified_base (13)..(13): 2'-OMe-nucleotide
  modified_base (14)..(14): 2'-fluoro-nucleotide
  modified_base (15)..(15): 2'-OMe-nucleotide
  modified_base (16)..(16): 2'-fluoro-nucleotide
  modified_base (17)..(17): 2'-OMe-nucleotide
  modified_base (18)..(18): 2'-fluoro-nucleotide
  modified_base (19)..(19): 2'-OMe-nucleotide
  modified_base (20)..(20): dT
  modified_base (21)..(21): dT
ugaccaagcuuggcagguctt

SEQ ID NO: 909 - DNA, 21 bp, Artificial Sequence
  source: /note="Description of Artificial Sequence: Synthetic oligonucleotide"
  source: /note="Description of Combined DNA/RNA Molecule: Synthetic oligonucleotide"
  modified_base (1)..(1): 2'-fluoro-nucleotide
  modified_base (2)..(2): 2'-fluoro-nucleotide
  modified_base (3)..(3): 2'-OMe-nucleotide
  modified_base (4)..(4): 2'-fluoro-nucleotide
  modified_base (5)..(5): 2'-OMe-nucleotide
  modified_base (6)..(6): 2'-fluoro-nucleotide
  modified_base (7)..(7): 2'-OMe-nucleotide
  modified_base (8)..(8): 2'-fluoro-nucleotide
  modified_base (9)..(9): 2'-OMe-nucleotide
  modified_base (10)..(10): 2'-fluoro-nucleotide
  modified_base (11)..(11): 2'-OMe-nucleotide
  modified_base (12)..(12): 2'-fluoro-nucleotide
  modified_base (13)..(13): 2'-OMe-nucleotide
  modified_base (14)..(14): 2'-fluoro-nucleotide
  modified_base (15)..(15): 2'-OMe-nucleotide
  modified_base (16)..(16): 2'-fluoro-nucleotide
  modified_base (17)..(17): 2'-OMe-nucleotide
  modified_base (18)..(18): 2'-fluoro-nucleotide
  modified_base (19)..(19): 2'-OMe-nucleotide
  modified_base (20)..(20): dT
  modified_base (21)..(21): dT
augaccaagcuuggcaggutt

SEQ ID NO: 910 - DNA, 21 bp, Artificial Sequence
  source: /note="Description of Artificial Sequence: Synthetic oligonucleotide"
  source: /note="Description of Combined DNA/RNA Molecule: Synthetic oligonucleotide"
  modified_base (1)..(1): 2'-fluoro-nucleotide
  modified_base (2)..(2): 2'-fluoro-nucleotide
  modified_base (3)..(3): 2'-OMe-nucleotide
  modified_base (4)..(4): 2'-fluoro-nucleotide
  modified_base (5)..(5): 2'-OMe-nucleotide
  modified_base (6)..(6): 2'-fluoro-nucleotide
  modified_base (7)..(7): 2'-OMe-nucleotide
  modified_base (8)..(8): 2'-fluoro-nucleotide
  modified_base (9)..(9): 2'-OMe-nucleotide
  modified_base (10)..(10): 2'-fluoro-nucleotide
  modified_base (11)..(11): 2'-OMe-nucleotide
  modified_base (12)..(12): 2'-fluoro-nucleotide
  modified_base (13)..(13): 2'-OMe-nucleotide
  modified_base (14)..(14): 2'-fluoro-nucleotide
  modified_base (15)..(15): 2'-OMe-nucleotide
  modified_base (16)..(16): 2'-fluoro-nucleotide
  modified_base (17)..(17): 2'-OMe-nucleotide
  modified_base (18)..(18): 2'-fluoro-nucleotide
  modified_base (19)..(19): 2'-OMe-nucleotide
  modified_base (20)..(20): dT
  modified_base (21)..(21): dT
gaugaccaagcuuggcaggtt

SEQ ID NO: 911 - DNA, 21 bp, Artificial Sequence
  source: /note="Description of Artificial Sequence: Synthetic oligonucleotide"
  source: /note="Description of Combined DNA/RNA Molecule: Synthetic oligonucleotide"
  modified_base (1)..(1): 2'-fluoro-nucleotide
  modified_base (2)..(2): 2'-fluoro-nucleotide
  modified_base (3)..(3): 2'-OMe-nucleotide
  modified_base (4)..(4): 2'-fluoro-nucleotide
  modified_base (5)..(5): 2'-OMe-nucleotide
  modified_base (6)..(6): 2'-fluoro-nucleotide
  modified_base (7)..(7): 2'-OMe-nucleotide
  modified_base (8)..(8): 2'-fluoro-nucleotide
  modified_base (9)..(9): 2'-OMe-nucleotide
  modified_base (10)..(10): 2'-fluoro-nucleotide
  modified_base (11)..(11): 2'-OMe-nucleotide
  modified_base (12)..(12): 2'-fluoro-nucleotide
  modified_base (13)..(13): 2'-OMe-nucleotide
  modified_base (14)..(14): 2'-fluoro-nucleotide
  modified_base (15)..(15): 2'-OMe-nucleotide
  modified_base (16)..(16): 2'-fluoro-nucleotide
  modified_base (17)..(17): 2'-OMe-nucleotide
  modified_base (18)..(18): 2'-fluoro-nucleotide
  modified_base (19)..(19): 2'-OMe-nucleotide
  modified_base (20)..(20): dT
  modified_base (21)..(21): dT
auagaugaccaagcuuggctt

SEQ ID NO: 912 - DNA, 21 bp, Artificial Sequence
  source: /note="Description of Artificial Sequence: Synthetic oligonucleotide"
  source: /note="Description of Combined DNA/RNA Molecule: Synthetic oligonucleotide"
  modified_base (1)..(1): 2'-fluoro-nucleotide
  modified_base (2)..(2): 2'-fluoro-nucleotide
  modified_base (3)..(3): 2'-OMe-nucleotide
  modified_base (4)..(4): 2'-fluoro-nucleotide
  modified_base (5)..(5): 2'-OMe-nucleotide
  modified_base (6)..(6): 2'-fluoro-nucleotide
  modified_base (7)..(7): 2'-OMe-nucleotide
  modified_base (8)..(8): 2'-fluoro-nucleotide
  modified_base (9)..(9): 2'-OMe-nucleotide
  modified_base (10)..(10): 2'-fluoro-nucleotide
  modified_base (11)..(11): 2'-OMe-nucleotide
  modified_base (12)..(12): 2'-fluoro-nucleotide
  modified_base (13)..(13): 2'-OMe-nucleotide
  modified_base (14)..(14): 2'-fluoro-nucleotide
  modified_base (15)..(15): 2'-OMe-nucleotide
  modified_base (16)..(16): 2'-fluoro-nucleotide
  modified_base (17)..(17): 2'-OMe-nucleotide
  modified_base (18)..(18): 2'-fluoro-nucleotide
  modified_base (19)..(19): 2'-OMe-nucleotide
  modified_base (20)..(20): dT
  modified_base (21)..(21): dT
cauagaugaccaagcuuggtt

SEQ ID NO: 913 - DNA, 21 bp, Artificial Sequence
  source: /note="Description of Artificial Sequence: Synthetic oligonucleotide"
  source: /note="Description of Combined DNA/RNA Molecule: Synthetic oligonucleotide"
  modified_base (1)..(1): 2'-fluoro-nucleotide
  modified_base (2)..(2): 2'-fluoro-nucleotide
  modified_base (3)..(3): 2'-OMe-nucleotide
  modified_base (4)..(4): 2'-fluoro-nucleotide
  modified_base (5)..(5): 2'-OMe-nucleotide
  modified_base (6)..(6): 2'-fluoro-nucleotide
  modified_base (7)..(7): 2'-OMe-nucleotide
  modified_base (8)..(8): 2'-fluoro-nucleotide
  modified_base (9)..(9): 2'-OMe-nucleotide
  modified_base (10)..(10): 2'-fluoro-nucleotide
  modified_base (11)..(11): 2'-OMe-nucleotide
  modified_base (12)..(12): 2'-fluoro-nucleotide
  modified_base (13)..(13): 2'-OMe-nucleotide
  modified_base (14)..(14): 2'-fluoro-nucleotide
  modified_base (15)..(15): 2'-OMe-nucleotide
  modified_base (16)..(16): 2'-fluoro-nucleotide
  modified_base (17)..(17): 2'-OMe-nucleotide
  modified_base (18)..(18): 2'-fluoro-nucleotide
  modified_base (19)..(19): 2'-OMe-nucleotide
  modified_base (20)..(20): dT
  modified_base (21)..(21): dT
uuucugugguccuauuaugtt

SEQ ID NO: 914 - DNA, 21 bp, Artificial Sequence
  source: /note="Description of Artificial Sequence: Synthetic oligonucleotide"
  source: /note="Description of Combined DNA/RNA Molecule: Synthetic oligonucleotide"
  modified_base (1)..(1): 2'-fluoro-nucleotide
  modified_base (2)..(2): 2'-fluoro-nucleotide
  modified_base (3)..(3): 2'-OMe-nucleotide
  modified_base (4)..(4): 2'-fluoro-nucleotide
  modified_base (5)..(5): 2'-OMe-nucleotide
  modified_base (6)..(6): 2'-fluoro-nucleotide
  modified_base (7)..(7): 2'-OMe-nucleotide
  modified_base (8)..(8): 2'-fluoro-nucleotide
  modified_base (9)..(9): 2'-OMe-nucleotide
  modified_base (10)..(10): 2'-fluoro-nucleotide
  modified_base (11)..(11): 2'-OMe-nucleotide
  modified_base (12)..(12): 2'-fluoro-nucleotide
  modified_base (13)..(13): 2'-OMe-nucleotide
  modified_base (14)..(14): 2'-fluoro-nucleotide
  modified_base (15)..(15): 2'-OMe-nucleotide
  modified_base (16)..(16): 2'-fluoro-nucleotide
  modified_base (17)..(17): 2'-OMe-nucleotide
  modified_base (18)..(18): 2'-fluoro-nucleotide
  modified_base (19)..(19): 2'-OMe-nucleotide
  modified_base (20)..(20): dT
  modified_base (21)..(21): dT
guuuucugugguccuauuatt

SEQ ID NO: 915 - DNA, 21 bp, Artificial Sequence
  source: /note="Description of Artificial Sequence: Synthetic oligonucleotide"
  source: /note="Description of Combined DNA/RNA Molecule: Synthetic oligonucleotide"
  modified_base (1)..(1): 2'-fluoro-nucleotide
  modified_base (2)..(2): 2'-fluoro-nucleotide
  modified_base (3)..(3): 2'-OMe-nucleotide
  modified_base (4)..(4): 2'-fluoro-nucleotide
  modified_base (5)..(5): 2'-OMe-nucleotide
  modified_base (6)..(6): 2'-fluoro-nucleotide
  modified_base (7)..(7): 2'-OMe-nucleotide
  modified_base (8)..(8): 2'-fluoro-nucleotide
  modified_base (9)..(9): 2'-OMe-nucleotide
  modified_base (10)..(10): 2'-fluoro-nucleotide
  modified_base (11)..(11): 2'-OMe-nucleotide
  modified_base (12)..(12): 2'-fluoro-nucleotide
  modified_base (13)..(13): 2'-OMe-nucleotide
  modified_base (14)..(14): 2'-fluoro-nucleotide
  modified_base (15)..(15): 2'-OMe-nucleotide
  modified_base (16)..(16): 2'-fluoro-nucleotide
  modified_base (17)..(17): 2'-OMe-nucleotide
  modified_base (18)..(18): 2'-fluoro-nucleotide
  modified_base (19)..(19): 2'-OMe-nucleotide
  modified_base (20)..(20): dT
  modified_base (21)..(21): dT
aguuuucugugguccuauutt

SEQ ID NO: 916 - DNA, 21 bp, Artificial Sequence
  source: /note="Description of Artificial Sequence: Synthetic oligonucleotide"
  source: /note="Description of Combined DNA/RNA Molecule: Synthetic oligonucleotide"
  modified_base (1)..(1): 2'-fluoro-nucleotide
  modified_base (2)..(2): 2'-fluoro-nucleotide
  modified_base (3)..(3): 2'-OMe-nucleotide
  modified_base (4)..(4): 2'-fluoro-nucleotide
  modified_base (5)..(5): 2'-OMe-nucleotide
  modified_base (6)..(6): 2'-fluoro-nucleotide
  modified_base (7)..(7): 2'-OMe-nucleotide
  modified_base (8)..(8): 2'-fluoro-nucleotide
  modified_base (9)..(9): 2'-OMe-nucleotide
  modified_base (10)..(10): 2'-fluoro-nucleotide
  modified_base (11)..(11): 2'-OMe-nucleotide
  modified_base (12)..(12): 2'-fluoro-nucleotide
  modified_base (13)..(13): 2'-OMe-nucleotide
  modified_base (14)..(14): 2'-fluoro-nucleotide
  modified_base (15)..(15): 2'-OMe-nucleotide
  modified_base (16)..(16): 2'-fluoro-nucleotide
  modified_base (17)..(17): 2'-OMe-nucleotide
  modified_base (18)..(18): 2'-fluoro-nucleotide
  modified_base (19)..(19): 2'-OMe-nucleotide
  modified_base (20)..(20): dT
  modified_base (21)..(21): dT
uaguuuucugugguccuautt

SEQ ID NO: 917 - DNA, 21 bp, Artificial Sequence
  source: /note="Description of Artificial Sequence: Synthetic oligonucleotide"
  source: /note="Description of Combined DNA/RNA Molecule: Synthetic oligonucleotide"
  modified_base (1)..(1): 2'-fluoro-nucleotide
  modified_base (2)..(2): 2'-fluoro-nucleotide
  modified_base (3)..(3): 2'-OMe-nucleotide
  modified_base (4)..(4): 2'-fluoro-nucleotide
  modified_base (5)..(5): 2'-OMe-nucleotide
  modified_base (6)..(6): 2'-fluoro-nucleotide
  modified_base (7)..(7): 2'-OMe-nucleotide
  modified_base (8)..(8): 2'-fluoro-nucleotide
  modified_base (9)..(9): 2'-OMe-nucleotide
  modified_base (10)..(10): 2'-fluoro-nucleotide
  modified_base (11)..(11): 2'-OMe-nucleotide
  modified_base (12)..(12): 2'-fluoro-nucleotide
  modified_base (13)..(13): 2'-OMe-nucleotide
  modified_base (14)..(14): 2'-fluoro-nucleotide
  modified_base (15)..(15): 2'-OMe-nucleotide
  modified_base (16)..(16): 2'-fluoro-nucleotide
  modified_base (17)..(17): 2'-OMe-nucleotide
  modified_base (18)..(18): 2'-fluoro-nucleotide
  modified_base (19)..(19): 2'-OMe-nucleotide
  modified_base (20)..(20): dT
  modified_base (21)..(21): dT
guaguuuucugugguccuatt

SEQ ID NO: 918 - DNA, 21 bp, Artificial Sequence
  source: /note="Description of Artificial Sequence: Synthetic oligonucleotide"
  source: /note="Description of Combined DNA/RNA Molecule: Synthetic oligonucleotide"
  modified_base (1)..(1): 2'-fluoro-nucleotide
  modified_base (2)..(2): 2'-fluoro-nucleotide
  modified_base (3)..(3): 2'-OMe-nucleotide
  modified_base (4)..(4): 2'-fluoro-nucleotide
  modified_base (5)..(5): 2'-OMe-nucleotide
  modified_base (6)..(6): 2'-fluoro-nucleotide
  modified_base (7)..(7): 2'-OMe-nucleotide
  modified_base (8)..(8): 2'-fluoro-nucleotide
  modified_base (9)..(9): 2'-OMe-nucleotide
  modified_base (10)..(10): 2'-fluoro-nucleotide
  modified_base (11)..(11): 2'-OMe-nucleotide
  modified_base (12)..(12): 2'-fluoro-nucleotide
  modified_base (13)..(13): 2'-OMe-nucleotide
  modified_base (14)..(14): 2'-fluoro-nucleotide
  modified_base (15)..(15): 2'-OMe-nucleotide
  modified_base (16)..(16): 2'-fluoro-nucleotide
  modified_base (17)..(17): 2'-OMe-nucleotide
  modified_base (18)..(18): 2'-fluoro-nucleotide
  modified_base (19)..(19): 2'-OMe-nucleotide
  modified_base (20)..(20): dT
  modified_base (21)..(21): dT
caugaucaagccagcauuutt

SEQ ID NO: 919 - DNA, 21 bp, Artificial Sequence
  source: /note="Description of Artificial Sequence: Synthetic oligonucleotide"
  source: /note="Description of Combined DNA/RNA Molecule: Synthetic oligonucleotide"
  modified_base (1)..(1): 2'-fluoro-nucleotide
  modified_base (2)..(2): 2'-fluoro-nucleotide
  modified_base (3)..(3): 2'-OMe-nucleotide
  modified_base (4)..(4): 2'-fluoro-nucleotide
  modified_base (5)..(5): 2'-OMe-nucleotide
  modified_base (6)..(6): 2'-fluoro-nucleotide
  modified_base (7)..(7): 2'-OMe-nucleotide
  modified_base (8)..(8): 2'-fluoro-nucleotide
  modified_base (9)..(9): 2'-OMe-nucleotide
  modified_base (10)..(10): 2'-fluoro-nucleotide
  modified_base (11)..(11): 2'-OMe-nucleotide
  modified_base (12)..(12): 2'-fluoro-nucleotide
  modified_base (13)..(13): 2'-OMe-nucleotide
  modified_base (14)..(14): 2'-fluoro-nucleotide
  modified_base (15)..(15): 2'-OMe-nucleotide
  modified_base (16)..(16): 2'-fluoro-nucleotide
  modified_base (17)..(17): 2'-OMe-nucleotide
  modified_base (18)..(18): 2'-fluoro-nucleotide
  modified_base (19)..(19): 2'-OMe-nucleotide
  modified_base (20)..(20): dT
  modified_base (21)..(21): dT
guaguucaugaucaagccatt

SEQ ID NO: 920 - DNA, 21 bp, Artificial Sequence
  source: /note="Description of Artificial Sequence: Synthetic oligonucleotide"
  source: /note="Description of Combined DNA/RNA Molecule: Synthetic oligonucleotide"
  modified_base (1)..(1): 2'-fluoro-nucleotide
  modified_base (2)..(2): 2'-fluoro-nucleotide
  modified_base (3)..(3): 2'-OMe-nucleotide
  modified_base (4)..(4): 2'-fluoro-nucleotide
  modified_base (5)..(5): 2'-OMe-nucleotide
  modified_base (6)..(6): 2'-fluoro-nucleotide
  modified_base (7)..(7): 2'-OMe-nucleotide
  modified_base (8)..(8): 2'-fluoro-nucleotide
  modified_base (9)..(9): 2'-OMe-nucleotide
  modified_base (10)..(10): 2'-fluoro-nucleotide
  modified_base (11)..(11): 2'-OMe-nucleotide
  modified_base (12)..(12): 2'-fluoro-nucleotide
  modified_base (13)..(13): 2'-OMe-nucleotide
  modified_base (14)..(14): 2'-fluoro-nucleotide
  modified_base (15)..(15): 2'-OMe-nucleotide
  modified_base (16)..(16): 2'-fluoro-nucleotide
  modified_base (17)..(17): 2'-OMe-nucleotide
  modified_base (18)..(18): 2'-fluoro-nucleotide
  modified_base (19)..(19): 2'-OMe-nucleotide
  modified_base (20)..(20): dT
  modified_base (21)..(21): dT
aguaguucaugaucaagcctt

SEQ ID NO: 921 - DNA, 21 bp, Artificial Sequence
  source: /note="Description of Artificial Sequence: Synthetic oligonucleotide"
  source: /note="Description of Combined DNA/RNA Molecule: Synthetic oligonucleotide"
  modified_base (1)..(1): 2'-fluoro-nucleotide
  modified_base (2)..(2): 2'-fluoro-nucleotide
  modified_base (3)..(3): 2'-OMe-nucleotide
  modified_base (4)..(4): 2'-fluoro-nucleotide
  modified_base (5)..(5): 2'-OMe-nucleotide
  modified_base (6)..(6): 2'-fluoro-nucleotide
  modified_base (7)..(7): 2'-OMe-nucleotide
  modified_base (8)..(8): 2'-fluoro-nucleotide
  modified_base (9)..(9): 2'-OMe-nucleotide
  modified_base (10)..(10): 2'-fluoro-nucleotide
  modified_base (11)..(11): 2'-OMe-nucleotide
  modified_base (12)..(12): 2'-fluoro-nucleotide
  modified_base (13)..(13): 2'-OMe-nucleotide
  modified_base (14)..(14): 2'-fluoro-nucleotide
  modified_base (15)..(15): 2'-OMe-nucleotide
  modified_base (16)..(16): 2'-fluoro-nucleotide
  modified_base (17)..(17): 2'-OMe-nucleotide
  modified_base (18)..(18): 2'-fluoro-nucleotide
  modified_base (19)..(19): 2'-OMe-nucleotide
  modified_base (20)..(20): dT
  modified_base (21)..(21): dT
cguauaacaauaaggagcutt

SEQ ID NO: 922 - DNA, 21 bp, Artificial Sequence
  source: /note="Description of Artificial Sequence: Synthetic oligonucleotide"
  source: /note="Description of Combined DNA/RNA Molecule: Synthetic oligonucleotide"
  modified_base (1)..(1): 2'-fluoro-nucleotide
  modified_base (2)..(2): 2'-fluoro-nucleotide
  modified_base (3)..(3): 2'-OMe-nucleotide
  modified_base (4)..(4): 2'-fluoro-nucleotide
  modified_base (5)..(5): 2'-OMe-nucleotide
  modified_base (6)..(6): 2'-fluoro-nucleotide
  modified_base (7)..(7): 2'-OMe-nucleotide
  modified_base (8)..(8): 2'-fluoro-nucleotide
  modified_base (9)..(9): 2'-OMe-nucleotide
  modified_base (10)..(10): 2'-fluoro-nucleotide
  modified_base (11)..(11): 2'-OMe-nucleotide
  modified_base (12)..(12): 2'-fluoro-nucleotide
  modified_base (13)..(13): 2'-OMe-nucleotide
  modified_base (14)..(14): 2'-fluoro-nucleotide
  modified_base (15)..(15): 2'-OMe-nucleotide
  modified_base (16)..(16): 2'-fluoro-nucleotide
  modified_base (17)..(17): 2'-OMe-nucleotide
  modified_base (18)..(18): 2'-fluoro-nucleotide
  modified_base (19)..(19): 2'-OMe-nucleotide
  modified_base (20)..(20): dT
  modified_base (21)..(21): dT
ucguauaacaauaaggagctt

SEQ ID NO: 923 - DNA, 21 bp, Artificial Sequence
  source: /note="Description of Artificial Sequence: Synthetic oligonucleotide"
  source: /note="Description of Combined DNA/RNA Molecule: Synthetic oligonucleotide"
  modified_base (1)..(1): 2'-fluoro-nucleotide
  modified_base (2)..(2): 2'-fluoro-nucleotide
  modified_base (3)..(3): 2'-OMe-nucleotide
  modified_base (4)..(4): 2'-fluoro-nucleotide
  modified_base (5)..(5): 2'-OMe-nucleotide
  modified_base (6)..(6): 2'-fluoro-nucleotide
  modified_base (7)..(7): 2'-OMe-nucleotide
  modified_base (8)..(8): 2'-fluoro-nucleotide
  modified_base (9)..(9): 2'-OMe-nucleotide
  modified_base (10)..(10): 2'-fluoro-nucleotide
  modified_base (11)..(11): 2'-OMe-nucleotide
  modified_base (12)..(12): 2'-fluoro-nucleotide
  modified_base (13)..(13): 2'-OMe-nucleotide
  modified_base (14)..(14): 2'-fluoro-nucleotide
  modified_base (15)..(15): 2'-OMe-nucleotide
  modified_base (16)..(16): 2'-fluoro-nucleotide
  modified_base (17)..(17): 2'-OMe-nucleotide
  modified_base (18)..(18): 2'-fluoro-nucleotide
  modified_base (19)..(19): 2'-OMe-nucleotide
  modified_base (20)..(20): dT
  modified_base (21)..(21): dT
ugcgucagguugcaguacutt

SEQ ID NO: 924 - DNA, 21 bp, Artificial Sequence
  source: /note="Description of Artificial Sequence: Synthetic oligonucleotide"
  source: /note="Description of Combined DNA/RNA Molecule: Synthetic oligonucleotide"
  modified_base (1)..(1): 2'-fluoro-nucleotide
  modified_base (2)..(2): 2'-fluoro-nucleotide
  modified_base (3)..(3): 2'-OMe-nucleotide
  modified_base (4)..(4): 2'-fluoro-nucleotide
  modified_base (5)..(5): 2'-OMe-nucleotide
  modified_base (6)..(6): 2'-fluoro-nucleotide
  modified_base (7)..(7): 2'-OMe-nucleotide
  modified_base (8)..(8): 2'-fluoro-nucleotide
  modified_base (9)..(9): 2'-OMe-nucleotide
  modified_base (10)..(10): 2'-fluoro-nucleotide
  modified_base (11)..(11): 2'-OMe-nucleotide
  modified_base (12)..(12): 2'-fluoro-nucleotide
  modified_base (13)..(13): 2'-OMe-nucleotide
  modified_base (14)..(14): 2'-fluoro-nucleotide
  modified_base (15)..(15): 2'-OMe-nucleotide
  modified_base (16)..(16): 2'-fluoro-nucleotide
  modified_base (17)..(17): 2'-OMe-nucleotide
  modified_base (18)..(18): 2'-fluoro-nucleotide
  modified_base (19)..(19): 2'-OMe-nucleotide
  modified_base (20)..(20): dT
  modified_base (21)..(21): dT
uugcgucagguugcaguactt

SEQ ID NO: 925 - DNA, 21 bp, Artificial Sequence
  source: /note="Description of Artificial Sequence: Synthetic oligonucleotide"
  source: /note="Description of Combined DNA/RNA Molecule: Synthetic oligonucleotide"
  modified_base (1)..(1): 2'-fluoro-nucleotide
  modified_base (2)..(2): 2'-fluoro-nucleotide
  modified_base (3)..(3): 2'-OMe-nucleotide
  modified_base (4)..(4): 2'-fluoro-nucleotide
  modified_base (5)..(5): 2'-OMe-nucleotide
  modified_base (6)..(6): 2'-fluoro-nucleotide
  modified_base (7)..(7): 2'-OMe-nucleotide
  modified_base (8)..(8): 2'-fluoro-nucleotide
  modified_base (9)..(9): 2'-OMe-nucleotide
  modified_base (10)..(10): 2'-fluoro-nucleotide
  modified_base (11)..(11): 2'-OMe-nucleotide
  modified_base (12)..(12): 2'-fluoro-nucleotide
  modified_base (13)..(13): 2'-OMe-nucleotide
  modified_base (14)..(14): 2'-fluoro-nucleotide
  modified_base (15)..(15): 2'-OMe-nucleotide
  modified_base (16)..(16): 2'-fluoro-nucleotide
  modified_base (17)..(17): 2'-OMe-nucleotide
  modified_base (18)..(18): 2'-fluoro-nucleotide
  modified_base (19)..(19): 2'-OMe-nucleotide
  modified_base (20)..(20): dT
  modified_base (21)..(21): dT
auugcgucagguugcaguatt

SEQ ID NO: 926 - DNA, 21 bp, Artificial Sequence
  source: /note="Description of Artificial Sequence: Synthetic oligonucleotide"
  source: /note="Description of Combined DNA/RNA Molecule: Synthetic oligonucleotide"
  modified_base (1)..(1): 2'-fluoro-nucleotide
  modified_base (2)..(2): 2'-fluoro-nucleotide
  modified_base (3)..(3): 2'-OMe-nucleotide
  modified_base (4)..(4): 2'-fluoro-nucleotide
  modified_base (5)..(5): 2'-OMe-nucleotide
  modified_base (6)..(6): 2'-fluoro-nucleotide
  modified_base (7)..(7): 2'-OMe-nucleotide
  modified_base (8)..(8): 2'-fluoro-nucleotide
  modified_base (9)..(9): 2'-OMe-nucleotide
  modified_base (10)..(10): 2'-fluoro-nucleotide
  modified_base (11)..(11): 2'-OMe-nucleotide
  modified_base (12)..(12): 2'-fluoro-nucleotide
  modified_base (13)..(13): 2'-OMe-nucleotide
  modified_base (14)..(14): 2'-fluoro-nucleotide
  modified_base (15)..(15): 2'-OMe-nucleotide
  modified_base (16)..(16): 2'-fluoro-nucleotide
  modified_base (17)..(17): 2'-OMe-nucleotide
  modified_base (18)..(18): 2'-fluoro-nucleotide
  modified_base (19)..(19): 2'-OMe-nucleotide
  modified_base (20)..(20): dT
  modified_base (21)..(21): dT
agcauugcgucagguugcatt

SEQ ID NO: 927 - DNA, 21 bp, Artificial Sequence
  source: /note="Description of Artificial Sequence: Synthetic oligonucleotide"
  source: /note="Description of Combined DNA/RNA Molecule: Synthetic oligonucleotide"
  modified_base (1)..(1): 2'-fluoro-nucleotide
  modified_base (2)..(2): 2'-fluoro-nucleotide
  modified_base (3)..(3): 2'-OMe-nucleotide
  modified_base (4)..(4): 2'-fluoro-nucleotide
  modified_base (5)..(5): 2'-OMe-nucleotide
  modified_base (6)..(6): 2'-fluoro-nucleotide
  modified_base (7)..(7): 2'-OMe-nucleotide
  modified_base (8)..(8): 2'-fluoro-nucleotide
  modified_base (9)..(9): 2'-OMe-nucleotide
  modified_base (10)..(10): 2'-fluoro-nucleotide
  modified_base (11)..(11): 2'-OMe-nucleotide
  modified_base (12)..(12): 2'-fluoro-nucleotide
  modified_base (13)..(13): 2'-OMe-nucleotide
  modified_base (14)..(14): 2'-fluoro-nucleotide
  modified_base (15)..(15): 2'-OMe-nucleotide
  modified_base (16)..(16): 2'-fluoro-nucleotide
  modified_base (17)..(17): 2'-OMe-nucleotide
  modified_base (18)..(18): 2'-fluoro-nucleotide
  modified_base (19)..(19): 2'-OMe-nucleotide
  modified_base (20)..(20): dT
  modified_base (21)..(21): dT
gagcauugcgucagguugctt

SEQ ID NO: 928 - DNA, 21 bp, Artificial Sequence
  source: /note="Description of Artificial Sequence: Synthetic oligonucleotide"
  source: /note="Description of Combined DNA/RNA Molecule: Synthetic oligonucleotide"
  modified_base (1)..(1): 2'-fluoro-nucleotide
  modified_base (2)..(2): 2'-fluoro-nucleotide
  modified_base (3)..(3): 2'-OMe-nucleotide
  modified_base (4)..(4): 2'-fluoro-nucleotide
  modified_base (5)..(5): 2'-OMe-nucleotide
  modified_base (6)..(6): 2'-fluoro-nucleotide
  modified_base (7)..(7): 2'-OMe-nucleotide
  modified_base (8)..(8): 2'-fluoro-nucleotide
  modified_base (9)..(9): 2'-OMe-nucleotide
  modified_base (10)..(10): 2'-fluoro-nucleotide
  modified_base (11)..(11): 2'-OMe-nucleotide
  modified_base (12)..(12): 2'-fluoro-nucleotide
  modified_base (13)..(13): 2'-OMe-nucleotide
  modified_base (14)..(14): 2'-fluoro-nucleotide
  modified_base (15)..(15): 2'-OMe-nucleotide
  modified_base (16)..(16): 2'-fluoro-nucleotide
  modified_base (17)..(17): 2'-OMe-nucleotide
  modified_base (18)..(18): 2'-fluoro-nucleotide
  modified_base (19)..(19): 2'-OMe-nucleotide
  modified_base (20)..(20): dT
  modified_base (21)..(21): dT
ugagcauugcgucagguugtt

SEQ ID NO: 929 - DNA, 21 bp, Artificial Sequence
  source: /note="Description of Artificial Sequence: Synthetic oligonucleotide"
  source: /note="Description of Combined DNA/RNA Molecule: Synthetic oligonucleotide"
  modified_base (1)..(1): 2'-fluoro-nucleotide
  modified_base (2)..(2): 2'-fluoro-nucleotide
  modified_base (3)..(3): 2'-OMe-nucleotide
  modified_base (4)..(4): 2'-fluoro-nucleotide
  modified_base (5)..(5): 2'-OMe-nucleotide
  modified_base (6)..(6): 2'-fluoro-nucleotide
  modified_base (7)..(7): 2'-OMe-nucleotide
  modified_base (8)..(8): 2'-fluoro-nucleotide
  modified_base (9)..(9): 2'-OMe-nucleotide
  modified_base (10)..(10): 2'-fluoro-nucleotide
  modified_base (11)..(11): 2'-OMe-nucleotide
  modified_base (12)..(12): 2'-fluoro-nucleotide
  modified_base (13)..(13): 2'-OMe-nucleotide
  modified_base (14)..(14): 2'-fluoro-nucleotide
  modified_base (15)..(15): 2'-OMe-nucleotide
  modified_base (16)..(16): 2'-fluoro-nucleotide
  modified_base (17)..(17): 2'-OMe-nucleotide
  modified_base (18)..(18): 2'-fluoro-nucleotide
  modified_base (19)..(19): 2'-OMe-nucleotide
  modified_base (20)..(20): dT
  modified_base (21)..(21): dT
cugagcauugcgucagguutt

SEQ ID NO: 930 - DNA, 21 bp, Artificial Sequence
  source: /note="Description of Artificial Sequence: Synthetic oligonucleotide"
  source: /note="Description of Combined DNA/RNA Molecule: Synthetic oligonucleotide"
  modified_base (1)..(1): 2'-fluoro-nucleotide
  modified_base (2)..(2): 2'-fluoro-nucleotide
  modified_base (3)..(3): 2'-OMe-nucleotide
  modified_base (4)..(4): 2'-fluoro-nucleotide
  modified_base (5)..(5): 2'-OMe-nucleotide
  modified_base (6)..(6): 2'-fluoro-nucleotide
  modified_base (7)..(7): 2'-OMe-nucleotide
  modified_base (8)..(8): 2'-fluoro-nucleotide
  modified_base (9)..(9): 2'-OMe-nucleotide
  modified_base (10)..(10): 2'-fluoro-nucleotide
  modified_base (11)..(11): 2'-OMe-nucleotide
  modified_base (12)..(12): 2'-fluoro-nucleotide
  modified_base (13)..(13): 2'-OMe-nucleotide
  modified_base (14)..(14): 2'-fluoro-nucleotide
  modified_base (15)..(15): 2'-OMe-nucleotide
  modified_base (16)..(16): 2'-fluoro-nucleotide
  modified_base (17)..(17): 2'-OMe-nucleotide
  modified_base (18)..(18): 2'-fluoro-nucleotide
  modified_base (19)..(19): 2'-OMe-nucleotide
  modified_base (20)..(20): dT
  modified_base (21)..(21): dT
ucugagcauugcgucaggutt

SEQ ID NO: 931 - DNA, 21 bp, Artificial Sequence
  source: /note="Description of Artificial Sequence: Synthetic oligonucleotide"
  source: /note="Description of Combined DNA/RNA Molecule: Synthetic oligonucleotide"
  modified_base (1)..(1): 2'-fluoro-nucleotide
  modified_base (2)..(2): 2'-fluoro-nucleotide
  modified_base (3)..(3): 2'-OMe-nucleotide
  modified_base (4)..(4): 2'-fluoro-nucleotide
  modified_base (5)..(5): 2'-OMe-nucleotide
  modified_base (6)..(6): 2'-fluoro-nucleotide
  modified_base (7)..(7): 2'-OMe-nucleotide
  modified_base (8)..(8): 2'-fluoro-nucleotide
  modified_base (9)..(9): 2'-OMe-nucleotide
  modified_base (10)..(10): 2'-fluoro-nucleotide
  modified_base (11)..(11): 2'-OMe-nucleotide
  modified_base (12)..(12): 2'-fluoro-nucleotide
  modified_base (13)..(13): 2'-OMe-nucleotide
  modified_base (14)..(14): 2'-fluoro-nucleotide
  modified_base (15)..(15): 2'-OMe-nucleotide
  modified_base (16)..(16): 2'-fluoro-nucleotide
  modified_base (17)..(17): 2'-OMe-nucleotide
  modified_base (18)..(18): 2'-fluoro-nucleotide
  modified_base (19)..(19): 2'-OMe-nucleotide
  modified_base (20)..(20): dT
  modified_base (21)..(21): dT
gucugagcauugcgucaggtt

SEQ ID NO: 932 - DNA, 21 bp, Artificial Sequence
  source: /note="Description of Artificial Sequence: Synthetic oligonucleotide"
  source: /note="Description of Combined DNA/RNA Molecule: Synthetic oligonucleotide"
  modified_base (1)..(1): 2'-fluoro-nucleotide
  modified_base (2)..(2): 2'-fluoro-nucleotide
  modified_base (3)..(3): 2'-OMe-nucleotide
  modified_base (4)..(4): 2'-fluoro-nucleotide
  modified_base (5)..(5): 2'-OMe-nucleotide
  modified_base (6)..(6): 2'-fluoro-nucleotide
  modified_base (7)..(7): 2'-OMe-nucleotide
  modified_base (8)..(8): 2'-fluoro-nucleotide
  modified_base (9)..(9): 2'-OMe-nucleotide
  modified_base (10)..(10): 2'-fluoro-nucleotide
  modified_base (11)..(11): 2'-OMe-nucleotide
  modified_base (12)..(12): 2'-fluoro-nucleotide
  modified_base (13)..(13): 2'-OMe-nucleotide
  modified_base (14)..(14): 2'-fluoro-nucleotide
  modified_base (15)..(15): 2'-OMe-nucleotide
  modified_base (16)..(16): 2'-fluoro-nucleotide
  modified_base (17)..(17): 2'-OMe-nucleotide
  modified_base (18)..(18): 2'-fluoro-nucleotide
  modified_base (19)..(19): 2'-OMe-nucleotide
  modified_base (20)..(20): dT
  modified_base (21)..(21): dT
cgucugagcauugcgucagtt

SEQ ID NO: 933 - DNA, 21 bp, Artificial Sequence
  source: /note="Description of Artificial Sequence: Synthetic oligonucleotide"
  source: /note="Description of Combined DNA/RNA Molecule: Synthetic oligonucleotide"
  modified_base (1)..(1): 2'-fluoro-nucleotide
  modified_base (2)..(2): 2'-fluoro-nucleotide
  modified_base (3)..(3): 2'-OMe-nucleotide
  modified_base (4)..(4): 2'-fluoro-nucleotide
  modified_base (5)..(5): 2'-OMe-nucleotide
  modified_base (6)..(6): 2'-fluoro-nucleotide
  modified_base (7)..(7): 2'-OMe-nucleotide
  modified_base (8)..(8): 2'-fluoro-nucleotide
  modified_base (9)..(9): 2'-OMe-nucleotide
  modified_base (10)..(10): 2'-fluoro-nucleotide
  modified_base (11)..(11): 2'-OMe-nucleotide
  modified_base (12)..(12): 2'-fluoro-nucleotide
  modified_base (13)..(13): 2'-OMe-nucleotide
  modified_base (14)..(14): 2'-fluoro-nucleotide
  modified_base (15)..(15): 2'-OMe-nucleotide
  modified_base (16)..(16): 2'-fluoro-nucleotide
  modified_base (17)..(17): 2'-OMe-nucleotide
  modified_base (18)..(18): 2'-fluoro-nucleotide
  modified_base (19)..(19): 2'-OMe-nucleotide
  modified_base (20)..(20): dT
  modified_base (21)..(21): dT
gcgucugagcauugcgucatt

SEQ ID NO: 934 - DNA, 21 bp, Artificial Sequence
  source: /note="Description of Artificial Sequence: Synthetic oligonucleotide"
  source: /note="Description of Combined DNA/RNA Molecule: Synthetic oligonucleotide"
  modified_base (1)..(1): 2'-fluoro-nucleotide
  modified_base (2)..(2): 2'-fluoro-nucleotide
  modified_base (3)..(3): 2'-OMe-nucleotide
  modified_base (4)..(4): 2'-fluoro-nucleotide
  modified_base (5)..(5): 2'-OMe-nucleotide
  modified_base (6)..(6): 2'-fluoro-nucleotide
  modified_base (7)..(7): 2'-OMe-nucleotide
  modified_base (8)..(8): 2'-fluoro-nucleotide
  modified_base (9)..(9): 2'-OMe-nucleotide
  modified_base (10)..(10): 2'-fluoro-nucleotide
  modified_base (11)..(11): 2'-OMe-nucleotide
  modified_base (12)..(12): 2'-fluoro-nucleotide
  modified_base (13)..(13): 2'-OMe-nucleotide
  modified_base (14)..(14): 2'-fluoro-nucleotide
  modified_base (15)..(15): 2'-OMe-nucleotide
  modified_base (16)..(16): 2'-fluoro-nucleotide
  modified_base (17)..(17): 2'-OMe-nucleotide
  modified_base (18)..(18): 2'-fluoro-nucleotide
  modified_base (19)..(19): 2'-OMe-nucleotide
  modified_base (20)..(20): dT
  modified_base (21)..(21): dT
aaccgggguaacagucggatt

SEQ ID NO: 935 - DNA, 21 bp, Artificial Sequence
  source: /note="Description of Artificial Sequence: Synthetic oligonucleotide"
  source: /note="Description of Combined DNA/RNA Molecule: Synthetic oligonucleotide"
  modified_base (1)..(1): 2'-fluoro-nucleotide
  modified_base (2)..(2): 2'-fluoro-nucleotide
  modified_base (3)..(3): 2'-OMe-nucleotide
  modified_base (4)..(4): 2'-fluoro-nucleotide
  modified_base (5)..(5): 2'-OMe-nucleotide
  modified_base (6)..(6): 2'-fluoro-nucleotide
  modified_base (7)..(7): 2'-OMe-nucleotide
  modified_base (8)..(8): 2'-fluoro-nucleotide
  modified_base (9)..(9): 2'-OMe-nucleotide
  modified_base (10)..(10): 2'-fluoro-nucleotide
  modified_base (11)..(11): 2'-OMe-nucleotide
  modified_base (12)..(12): 2'-fluoro-nucleotide
  modified_base (13)..(13): 2'-OMe-nucleotide
  modified_base (14)..(14): 2'-fluoro-nucleotide
  modified_base (15)..(15): 2'-OMe-nucleotide
  modified_base (16)..(16): 2'-fluoro-nucleotide
  modified_base (17)..(17): 2'-OMe-nucleotide
  modified_base (18)..(18): 2'-fluoro-nucleotide
  modified_base (19)..(19): 2'-OMe-nucleotide
  modified_base (20)..(20): dT
  modified_base (21)..(21): dT
uuggaaccgggguaacagutt

SEQ ID NO: 936 - DNA, 21 bp, Artificial Sequence
  source: /note="Description of Artificial Sequence: Synthetic oligonucleotide"
  source: /note="Description of Combined DNA/RNA Molecule: Synthetic oligonucleotide"
  modified_base (1)..(1): 2'-fluoro-nucleotide
  modified_base (2)..(2): 2'-fluoro-nucleotide
  modified_base (3)..(3): 2'-OMe-nucleotide
  modified_base (4)..(4): 2'-fluoro-nucleotide
  modified_base (5)..(5): 2'-OMe-nucleotide
  modified_base (6)..(6): 2'-fluoro-nucleotide
  modified_base (7)..(7): 2'-OMe-nucleotide
  modified_base (8)..(8): 2'-fluoro-nucleotide
  modified_base (9)..(9): 2'-OMe-nucleotide
  modified_base (10)..(10): 2'-fluoro-nucleotide
  modified_base (11)..(11): 2'-OMe-nucleotide
  modified_base (12)..(12): 2'-fluoro-nucleotide
  modified_base (13)..(13): 2'-OMe-nucleotide
  modified_base (14)..(14): 2'-fluoro-nucleotide
  modified_base (15)..(15): 2'-OMe-nucleotide
  modified_base (16)..(16): 2'-fluoro-nucleotide
  modified_base (17)..(17): 2'-OMe-nucleotide
  modified_base (18)..(18): 2'-fluoro-nucleotide
  modified_base (19)..(19): 2'-OMe-nucleotide
  modified_base (20)..(20): dT
  modified_base (21)..(21): dT
cuuggaaccgggguaacagtt

SEQ ID NO: 937 - DNA, 21 bp, Artificial Sequence
  source: /note="Description of Artificial Sequence: Synthetic oligonucleotide"
  source: /note="Description of Combined DNA/RNA Molecule: Synthetic oligonucleotide"
  modified_base (1)..(1): 2'-fluoro-nucleotide
  modified_base (2)..(2): 2'-fluoro-nucleotide
  modified_base (3)..(3): 2'-OMe-nucleotide
  modified_base (4)..(4): 2'-fluoro-nucleotide
  modified_base (5)..(5): 2'-OMe-nucleotide
  modified_base (6)..(6): 2'-fluoro-nucleotide
  modified_base (7)..(7): 2'-OMe-nucleotide
  modified_base (8)..(8): 2'-fluoro-nucleotide
  modified_base (9)..(9): 2'-OMe-nucleotide
  modified_base (10)..(10): 2'-fluoro-nucleotide
  modified_base (11)..(11): 2'-OMe-nucleotide
  modified_base (12)..(12): 2'-fluoro-nucleotide
  modified_base (13)..(13): 2'-OMe-nucleotide
  modified_base (14)..(14): 2'-fluoro-nucleotide
  modified_base (15)..(15): 2'-OMe-nucleotide
  modified_base (16)..(16): 2'-fluoro-nucleotide
  modified_base (17)..(17): 2'-OMe-nucleotide
  modified_base (18)..(18): 2'-fluoro-nucleotide
  modified_base (19)..(19): 2'-OMe-nucleotide
  modified_base (20)..(20): dT
  modified_base (21)..(21): dT
gcuuggaaccgggguaacatt

SEQ ID NO: 938 - DNA, 21 bp, Artificial Sequence
  source: /note="Description of Artificial Sequence: Synthetic oligonucleotide"
  source: /note="Description of Combined DNA/RNA Molecule: Synthetic oligonucleotide"
  modified_base (1)..(1): 2'-fluoro-nucleotide
  modified_base (2)..(2): 2'-fluoro-nucleotide
  modified_base (3)..(3): 2'-OMe-nucleotide
  modified_base (4)..(4): 2'-fluoro-nucleotide
  modified_base (5)..(5): 2'-OMe-nucleotide
  modified_base (6)..(6): 2'-fluoro-nucleotide
  modified_base (7)..(7): 2'-OMe-nucleotide
  modified_base (8)..(8): 2'-fluoro-nucleotide
  modified_base (9)..(9): 2'-OMe-nucleotide
  modified_base (10)..(10): 2'-fluoro-nucleotide
  modified_base (11)..(11): 2'-OMe-nucleotide
  modified_base (12)..(12): 2'-fluoro-nucleotide
  modified_base (13)..(13): 2'-OMe-nucleotide
  modified_base (14)..(14): 2'-fluoro-nucleotide
  modified_base (15)..(15): 2'-OMe-nucleotide
  modified_base (16)..(16): 2'-fluoro-nucleotide
  modified_base (17)..(17): 2'-OMe-nucleotide
  modified_base (18)..(18): 2'-fluoro-nucleotide
  modified_base (19)..(19): 2'-OMe-nucleotide
  modified_base (20)..(20): dT
  modified_base (21)..(21): dT
aggcuuggaaccgggguaatt

SEQ ID NO: 939 - DNA, 21 bp, Artificial Sequence
  source: /note="Description of Artificial Sequence: Synthetic oligonucleotide"
  source: /note="Description of Combined DNA/RNA Molecule: Synthetic oligonucleotide"
  modified_base (1)..(1): 2'-fluoro-nucleotide
  modified_base (2)..(2): 2'-fluoro-nucleotide
  modified_base (3)..(3): 2'-OMe-nucleotide
  modified_base (4)..(4): 2'-fluoro-nucleotide
  modified_base (5)..(5): 2'-OMe-nucleotide
  modified_base (6)..(6): 2'-fluoro-nucleotide
  modified_base (7)..(7): 2'-OMe-nucleotide
  modified_base (8)..(8): 2'-fluoro-nucleotide
  modified_base (9)..(9): 2'-OMe-nucleotide
  modified_base (10)..(10): 2'-fluoro-nucleotide
  modified_base (11)..(11): 2'-OMe-nucleotide
  modified_base (12)..(12): 2'-fluoro-nucleotide
  modified_base (13)..(13): 2'-OMe-nucleotide
  modified_base (14)..(14): 2'-fluoro-nucleotide
  modified_base (15)..(15): 2'-OMe-nucleotide
  modified_base (16)..(16): 2'-fluoro-nucleotide
  modified_base (17)..(17): 2'-OMe-nucleotide
  modified_base (18)..(18): 2'-fluoro-nucleotide
  modified_base (19)..(19): 2'-OMe-nucleotide
  modified_base (20)..(20): dT
  modified_base (21)..(21): dT
uaggcuuggaaccgggguatt

SEQ ID NO: 940 - DNA, 21 bp, Artificial Sequence
  source: /note="Description of Artificial Sequence: Synthetic oligonucleotide"
  source: /note="Description of Combined DNA/RNA Molecule: Synthetic oligonucleotide"
  modified_base (1)..(1): 2'-fluoro-nucleotide
  modified_base (2)..(2): 2'-fluoro-nucleotide
  modified_base (3)..(3): 2'-OMe-nucleotide
  modified_base (4)..(4): 2'-fluoro-nucleotide
  modified_base (5)..(5): 2'-OMe-nucleotide
  modified_base (6)..(6): 2'-fluoro-nucleotide
  modified_base (7)..(7): 2'-OMe-nucleotide
  modified_base (8)..(8): 2'-fluoro-nucleotide
  modified_base (9)..(9): 2'-OMe-nucleotide
  modified_base (10)..(10): 2'-fluoro-nucleotide
  modified_base (11)..(11): 2'-OMe-nucleotide
  modified_base (12)..(12): 2'-fluoro-nucleotide
  modified_base (13)..(13): 2'-OMe-nucleotide
  modified_base (14)..(14): 2'-fluoro-nucleotide
  modified_base (15)..(15): 2'-OMe-nucleotide
  modified_base (16)..(16): 2'-fluoro-nucleotide
  modified_base (17)..(17): 2'-OMe-nucleotide
  modified_base (18)..(18): 2'-fluoro-nucleotide
  modified_base (19)..(19): 2'-OMe-nucleotide
  modified_base (20)..(20): dT
  modified_base (21)..(21): dT
agccucuaggcuuggaacctt

SEQ ID NO: 941 - DNA, 21 bp, Artificial Sequence
  source: /note="Description of Artificial Sequence: Synthetic oligonucleotide"
  source: /note="Description of Combined DNA/RNA Molecule: Synthetic oligonucleotide"
  modified_base (1)..(1): 2'-fluoro-nucleotide
  modified_base (2)..(2): 2'-fluoro-nucleotide
  modified_base (3)..(3): 2'-OMe-nucleotide
  modified_base (4)..(4): 2'-fluoro-nucleotide
  modified_base (5)..(5): 2'-OMe-nucleotide
  modified_base (6)..(6): 2'-fluoro-nucleotide
  modified_base (7)..(7): 2'-OMe-nucleotide
  modified_base (8)..(8): 2'-fluoro-nucleotide
  modified_base (9)..(9): 2'-OMe-nucleotide
  modified_base (10)..(10): 2'-fluoro-nucleotide
  modified_base (11)..(11): 2'-OMe-nucleotide
  modified_base (12)..(12): 2'-fluoro-nucleotide
  modified_base (13)..(13): 2'-OMe-nucleotide
  modified_base (14)..(14): 2'-fluoro-nucleotide
  modified_base (15)..(15): 2'-OMe-nucleotide
  modified_base (16)..(16): 2'-fluoro-nucleotide
  modified_base (17)..(17): 2'-OMe-nucleotide
  modified_base (18)..(18): 2'-fluoro-nucleotide
  modified_base (19)..(19): 2'-OMe-nucleotide
  modified_base (20)..(20): dT
  modified_base (21)..(21): dT
gagccucuaggcuuggaactt

SEQ ID NO: 942 - DNA, 21 bp, Artificial Sequence
  source: /note="Description of Artificial Sequence: Synthetic oligonucleotide"
  source: /note="Description of Combined DNA/RNA Molecule: Synthetic oligonucleotide"
  modified_base (1)..(1): 2'-fluoro-nucleotide
  modified_base (2)..(2): 2'-fluoro-nucleotide
  modified_base (3)..(3): 2'-OMe-nucleotide
  modified_base (4)..(4): 2'-fluoro-nucleotide
  modified_base (5)..(5): 2'-OMe-nucleotide
  modified_base (6)..(6): 2'-fluoro-nucleotide
  modified_base (7)..(7): 2'-OMe-nucleotide
  modified_base (8)..(8): 2'-fluoro-nucleotide
  modified_base (9)..(9): 2'-OMe-nucleotide
  modified_base (10)..(10): 2'-fluoro-nucleotide
  modified_base (11)..(11): 2'-OMe-nucleotide
  modified_base (12)..(12): 2'-fluoro-nucleotide
  modified_base (13)..(13): 2'-OMe-nucleotide
  modified_base (14)..(14): 2'-fluoro-nucleotide
  modified_base (15)..(15): 2'-OMe-nucleotide
  modified_base (16)..(16): 2'-fluoro-nucleotide
  modified_base (17)..(17): 2'-OMe-nucleotide
  modified_base (18)..(18): 2'-fluoro-nucleotide
  modified_base (19)..(19): 2'-OMe-nucleotide
  modified_base (20)..(20): dT
  modified_base (21)..(21): dT
uucggaaggagccucuaggtt

SEQ ID NO: 943 - DNA, 21 bp, Artificial Sequence
  source: /note="Description of Artificial Sequence: Synthetic oligonucleotide"
  source: /note="Description of Combined DNA/RNA Molecule: Synthetic oligonucleotide"
  modified_base (1)..(1): 2'-fluoro-nucleotide
  modified_base (2)..(2): 2'-fluoro-nucleotide
  modified_base (3)..(3): 2'-OMe-nucleotide
  modified_base (4)..(4): 2'-fluoro-nucleotide
  modified_base (5)..(5): 2'-OMe-nucleotide
  modified_base (6)..(6): 2'-fluoro-nucleotide
  modified_base (7)..(7): 2'-OMe-nucleotide
  modified_base (8)..(8): 2'-fluoro-nucleotide
  modified_base (9)..(9): 2'-OMe-nucleotide
  modified_base (10)..(10): 2'-fluoro-nucleotide
  modified_base (11)..(11): 2'-OMe-nucleotide
  modified_base (12)..(12): 2'-fluoro-nucleotide
  modified_base (13)..(13): 2'-OMe-nucleotide
  modified_base (14)..(14): 2'-fluoro-nucleotide
  modified_base (15)..(15): 2'-OMe-nucleotide
  modified_base (16)..(16): 2'-fluoro-nucleotide
  modified_base (17)..(17): 2'-OMe-nucleotide
  modified_base (18)..(18): 2'-fluoro-nucleotide
  modified_base (19)..(19): 2'-OMe-nucleotide
  modified_base (20)..(20): dT
  modified_base (21)..(21): dT
guucggaaggagccucuagtt

SEQ ID NO: 944 - DNA, 21 bp, Artificial Sequence
  source: /note="Description of Artificial Sequence: Synthetic oligonucleotide"
  source: /note="Description of Combined DNA/RNA Molecule: Synthetic oligonucleotide"
  modified_base (1)..(1): 2'-fluoro-nucleotide
  modified_base (2)..(2): 2'-fluoro-nucleotide
  modified_base (3)..(3): 2'-OMe-nucleotide
  modified_base (4)..(4): 2'-fluoro-nucleotide
  modified_base (5)..(5): 2'-OMe-nucleotide
  modified_base (6)..(6): 2'-fluoro-nucleotide
  modified_base (7)..(7): 2'-OMe-nucleotide
  modified_base (8)..(8): 2'-fluoro-nucleotide
  modified_base (9)..(9): 2'-OMe-nucleotide
  modified_base (10)..(10): 2'-fluoro-nucleotide
  modified_base (11)..(11): 2'-OMe-nucleotide
  modified_base (12)..(12): 2'-fluoro-nucleotide
  modified_base (13)..(13): 2'-OMe-nucleotide
  modified_base (14)..(14): 2'-fluoro-nucleotide
  modified_base (15)..(15): 2'-OMe-nucleotide
  modified_base (16)..(16): 2'-fluoro-nucleotide
  modified_base (17)..(17): 2'-OMe-nucleotide
  modified_base (18)..(18): 2'-fluoro-nucleotide
  modified_base (19)..(19): 2'-OMe-nucleotide
  modified_base (20)..(20): dT
  modified_base (21)..(21): dT
ugcuuguucggaaggagcctt

SEQ ID NO: 945 - DNA, 21 bp, Artificial Sequence
  source: /note="Description of Artificial Sequence: Synthetic oligonucleotide"
  source: /note="Description of Combined DNA/RNA Molecule: Synthetic oligonucleotide"
  modified_base (1)..(1): 2'-fluoro-nucleotide
  modified_base (2)..(2): 2'-fluoro-nucleotide
  modified_base (3)..(3): 2'-OMe-nucleotide
  modified_base (4)..(4): 2'-fluoro-nucleotide
  modified_base (5)..(5): 2'-OMe-nucleotide
  modified_base (6)..(6): 2'-fluoro-nucleotide
  modified_base (7)..(7): 2'-OMe-nucleotide
  modified_base (8)..(8): 2'-fluoro-nucleotide
  modified_base (9)..(9): 2'-OMe-nucleotide
  modified_base (10)..(10): 2'-fluoro-nucleotide
  modified_base (11)..(11): 2'-OMe-nucleotide
  modified_base (12)..(12): 2'-fluoro-nucleotide
  modified_base (13)..(13): 2'-OMe-nucleotide
  modified_base (14)..(14): 2'-fluoro-nucleotide
  modified_base (15)..(15): 2'-OMe-nucleotide
  modified_base (16)..(16): 2'-fluoro-nucleotide
  modified_base (17)..(17): 2'-OMe-nucleotide
  modified_base (18)..(18): 2'-fluoro-nucleotide
  modified_base (19)..(19): 2'-OMe-nucleotide
  modified_base (20)..(20): dT
  modified_base (21)..(21): dT
ucggugcuuguucggaaggtt

SEQ ID NO: 946 - DNA, 21 bp, Artificial Sequence
  source: /note="Description of Artificial Sequence: Synthetic oligonucleotide"
  source: /note="Description of Combined DNA/RNA Molecule: Synthetic oligonucleotide"
  modified_base (1)..(1): 2'-fluoro-nucleotide
  modified_base (2)..(2): 2'-fluoro-nucleotide
  modified_base (3)..(3): 2'-OMe-nucleotide
  modified_base (4)..(4): 2'-fluoro-nucleotide
  modified_base (5)..(5): 2'-OMe-nucleotide
  modified_base (6)..(6): 2'-fluoro-nucleotide
  modified_base (7)..(7): 2'-OMe-nucleotide
  modified_base (8)..(8): 2'-fluoro-nucleotide
  modified_base (9)..(9): 2'-OMe-nucleotide
  modified_base (10)..(10): 2'-fluoro-nucleotide
  modified_base (11)..(11): 2'-OMe-nucleotide
  modified_base (12)..(12): 2'-fluoro-nucleotide
  modified_base (13)..(13): 2'-OMe-nucleotide
  modified_base (14)..(14): 2'-fluoro-nucleotide
  modified_base (15)..(15): 2'-OMe-nucleotide
  modified_base (16)..(16): 2'-fluoro-nucleotide
  modified_base (17)..(17): 2'-OMe-nucleotide
  modified_base (18)..(18): 2'-fluoro-nucleotide
  modified_base (19)..(19): 2'-OMe-nucleotide
  modified_base (20)..(20): dT
  modified_base (21)..(21): dT
gucggugcuuguucggaagtt

SEQ ID NO: 947 - DNA, 21 bp, Artificial Sequence
  source: /note="Description of Artificial Sequence: Synthetic oligonucleotide"
  source: /note="Description of Combined DNA/RNA Molecule: Synthetic oligonucleotide"
  modified_base (1)..(1): 2'-fluoro-nucleotide
  modified_base (2)..(2): 2'-fluoro-nucleotide
  modified_base (3)..(3): 2'-OMe-nucleotide
  modified_base (4)..(4): 2'-fluoro-nucleotide
  modified_base (5)..(5): 2'-OMe-nucleotide
  modified_base (6)..(6): 2'-fluoro-nucleotide
  modified_base (7)..(7): 2'-OMe-nucleotide
  modified_base (8)..(8): 2'-fluoro-nucleotide
  modified_base (9)..(9): 2'-OMe-nucleotide
  modified_base (10)..(10): 2'-fluoro-nucleotide
  modified_base (11)..(11): 2'-OMe-nucleotide
  modified_base (12)..(12): 2'-fluoro-nucleotide
  modified_base (13)..(13): 2'-OMe-nucleotide
  modified_base (14)..(14): 2'-fluoro-nucleotide
  modified_base (15)..(15): 2'-OMe-nucleotide
  modified_base (16)..(16): 2'-fluoro-nucleotide
  modified_base (17)..(17): 2'-OMe-nucleotide
  modified_base (18)..(18): 2'-fluoro-nucleotide
  modified_base (19)..(19): 2'-OMe-nucleotide
  modified_base (20)..(20): dT
  modified_base (21)..(21): dT
agucggugcuuguucggaatt

SEQ ID NO: 948 - DNA, 21 bp, Artificial Sequence
  source: /note="Description of Artificial Sequence: Synthetic oligonucleotide"
  source: /note="Description of Combined DNA/RNA Molecule: Synthetic oligonucleotide"
  modified_base (1)..(1): 2'-fluoro-nucleotide
  modified_base (2)..(2): 2'-fluoro-nucleotide
  modified_base (3)..(3): 2'-OMe-nucleotide
  modified_base (4)..(4): 2'-fluoro-nucleotide
  modified_base (5)..(5): 2'-OMe-nucleotide
  modified_base (6)..(6): 2'-fluoro-nucleotide
  modified_base (7)..(7): 2'-OMe-nucleotide
  modified_base (8)..(8): 2'-fluoro-nucleotide
  modified_base (9)..(9): 2'-OMe-nucleotide
  modified_base (10)..(10): 2'-fluoro-nucleotide
  modified_base (11)..(11): 2'-OMe-nucleotide
  modified_base (12)..(12): 2'-fluoro-nucleotide
  modified_base (13)..(13): 2'-OMe-nucleotide
  modified_base (14)..(14): 2'-fluoro-nucleotide
  modified_base (15)..(15): 2'-OMe-nucleotide
  modified_base (16)..(16): 2'-fluoro-nucleotide
  modified_base (17)..(17): 2'-OMe-nucleotide
  modified_base (18)..(18): 2'-fluoro-nucleotide
  modified_base (19)..(19): 2'-OMe-nucleotide
  modified_base (20)..(20): dT
  modified_base (21)..(21): dT
cagucggugcuuguucggatt

SEQ ID NO: 949 - DNA, 21 bp, Artificial Sequence
  source: /note="Description of Artificial Sequence: Synthetic oligonucleotide"
  source: /note="Description of Combined DNA/RNA Molecule: Synthetic oligonucleotide"
  modified_base (1)..(1): 2'-fluoro-nucleotide
  modified_base (2)..(2): 2'-fluoro-nucleotide
  modified_base (3)..(3): 2'-OMe-nucleotide
  modified_base (4)..(4): 2'-fluoro-nucleotide
  modified_base (5)..(5): 2'-OMe-nucleotide
  modified_base (6)..(6): 2'-fluoro-nucleotide
  modified_base (7)..(7): 2'-OMe-nucleotide
  modified_base (8)..(8): 2'-fluoro-nucleotide
  modified_base (9)..(9): 2'-OMe-nucleotide
  modified_base (10)..(10): 2'-fluoro-nucleotide
  modified_base (11)..(11): 2'-OMe-nucleotide
  modified_base (12)..(12): 2'-fluoro-nucleotide
  modified_base (13)..(13): 2'-OMe-nucleotide
  modified_base (14)..(14): 2'-fluoro-nucleotide
  modified_base (15)..(15): 2'-OMe-nucleotide
  modified_base (16)..(16): 2'-fluoro-nucleotide
  modified_base (17)..(17): 2'-OMe-nucleotide
  modified_base (18)..(18): 2'-fluoro-nucleotide
  modified_base (19)..(19): 2'-OMe-nucleotide
  modified_base (20)..(20): dT
  modified_base (21)..(21): dT
ucagucggugcuuguucggtt

SEQ ID NO: 950 - DNA, 21 bp, Artificial Sequence
  source: /note="Description of Artificial Sequence: Synthetic oligonucleotide"
  source: /note="Description of Combined DNA/RNA Molecule: Synthetic oligonucleotide"
  modified_base (1)..(1): 2'-fluoro-nucleotide
  modified_base (2)..(2): 2'-fluoro-nucleotide
  modified_base (3)..(3): 2'-OMe-nucleotide
  modified_base (4)..(4): 2'-fluoro-nucleotide
  modified_base (5)..(5): 2'-OMe-nucleotide
  modified_base (6)..(6): 2'-fluoro-nucleotide
  modified_base (7)..(7): 2'-OMe-nucleotide
  modified_base (8)..(8): 2'-fluoro-nucleotide
  modified_base (9)..(9): 2'-OMe-nucleotide
  modified_base (10)..(10): 2'-fluoro-nucleotide
  modified_base (11)..(11): 2'-OMe-nucleotide
  modified_base (12)..(12): 2'-fluoro-nucleotide
  modified_base (13)..(13): 2'-OMe-nucleotide
  modified_base (14)..(14): 2'-fluoro-nucleotide
  modified_base (15)..(15): 2'-OMe-nucleotide
  modified_base (16)..(16): 2'-fluoro-nucleotide
  modified_base (17)..(17): 2'-OMe-nucleotide
  modified_base (18)..(18): 2'-fluoro-nucleotide
  modified_base (19)..(19): 2'-OMe-nucleotide
  modified_base (20)..(20): dT
  modified_base (21)..(21): dT
gcucagucggugcuuguuctt

SEQ ID NO: 951 - DNA, 21 bp, Artificial Sequence
  source: /note="Description of Artificial Sequence: Synthetic oligonucleotide"
  source: /note="Description of Combined DNA/RNA Molecule: Synthetic oligonucleotide"
  modified_base (1)..(1): 2'-fluoro-nucleotide
  modified_base (2)..(2): 2'-fluoro-nucleotide
  modified_base (3)..(3): 2'-OMe-nucleotide
  modified_base (4)..(4): 2'-fluoro-nucleotide
  modified_base (5)..(5): 2'-OMe-nucleotide
  modified_base (6)..(6): 2'-fluoro-nucleotide
  modified_base (7)..(7): 2'-OMe-nucleotide
  modified_base (8)..(8): 2'-fluoro-nucleotide
  modified_base (9)..(9): 2'-OMe-nucleotide
  modified_base (10)..(10): 2'-fluoro-nucleotide
  modified_base (11)..(11): 2'-OMe-nucleotide
  modified_base (12)..(12): 2'-fluoro-nucleotide
  modified_base (13)..(13): 2'-OMe-nucleotide
  modified_base (14)..(14): 2'-fluoro-nucleotide
  modified_base (15)..(15): 2'-OMe-nucleotide
  modified_base (16)..(16): 2'-fluoro-nucleotide
  modified_base (17)..(17): 2'-OMe-nucleotide
  modified_base (18)..(18): 2'-fluoro-nucleotide
  modified_base (19)..(19): 2'-OMe-nucleotide
  modified_base (20)..(20): dT
  modified_base (21)..(21): dT
ugcucagucggugcuuguutt

SEQ ID NO: 952 - DNA, 21 bp, Artificial Sequence
  source: /note="Description of Artificial Sequence: Synthetic oligonucleotide"
  source: /note="Description of Combined DNA/RNA Molecule: Synthetic oligonucleotide"
  modified_base (1)..(1): 2'-fluoro-nucleotide
  modified_base (2)..(2): 2'-fluoro-nucleotide
  modified_base (3)..(3): 2'-OMe-nucleotide
  modified_base (4)..(4): 2'-fluoro-nucleotide
  modified_base (5)..(5): 2'-OMe-nucleotide
  modified_base (6)..(6): 2'-fluoro-nucleotide
  modified_base (7)..(7): 2'-OMe-nucleotide
  modified_base (8)..(8): 2'-fluoro-nucleotide
  modified_base (9)..(9): 2'-OMe-nucleotide
  modified_base (10)..(10): 2'-fluoro-nucleotide
  modified_base (11)..(11): 2'-OMe-nucleotide
  modified_base (12)..(12): 2'-fluoro-nucleotide
  modified_base (13)..(13): 2'-OMe-nucleotide
  modified_base (14)..(14): 2'-fluoro-nucleotide
  modified_base (15)..(15): 2'-OMe-nucleotide
  modified_base (16)..(16): 2'-fluoro-nucleotide
  modified_base (17)..(17): 2'-OMe-nucleotide
  modified_base (18)..(18): 2'-fluoro-nucleotide
  modified_base (19)..(19): 2'-OMe-nucleotide
  modified_base (20)..(20): dT
  modified_base (21)..(21): dT
uugcucagucggugcuugutt

SEQ ID NO: 953 - DNA, 21 bp, Artificial Sequence
  source: /note="Description of Artificial Sequence: Synthetic oligonucleotide"
  source: /note="Description of Combined DNA/RNA Molecule: Synthetic oligonucleotide"
  modified_base (1)..(1): 2'-fluoro-nucleotide
  modified_base (2)..(2): 2'-fluoro-nucleotide
  modified_base (3)..(3): 2'-OMe-nucleotide
  modified_base (4)..(4): 2'-fluoro-nucleotide
  modified_base (5)..(5): 2'-OMe-nucleotide
  modified_base (6)..(6): 2'-fluoro-nucleotide
  modified_base (7)..(7): 2'-OMe-nucleotide
  modified_base (8)..(8): 2'-fluoro-nucleotide
  modified_base (9)..(9): 2'-OMe-nucleotide
  modified_base (10)..(10): 2'-fluoro-nucleotide
  modified_base (11)..(11): 2'-OMe-nucleotide
  modified_base (12)..(12): 2'-fluoro-nucleotide
  modified_base (13)..(13): 2'-OMe-nucleotide
  modified_base (14)..(14): 2'-fluoro-nucleotide
  modified_base (15)..(15): 2'-OMe-nucleotide
  modified_base (16)..(16): 2'-fluoro-nucleotide
  modified_base (17)..(17): 2'-OMe-nucleotide
  modified_base (18)..(18): 2'-fluoro-nucleotide
  modified_base (19)..(19): 2'-OMe-nucleotide
  modified_base (20)..(20): dT
  modified_base (21)..(21): dT
uuugcucagucggugcuugtt

SEQ ID NO: 954 - DNA, 21 bp, Artificial Sequence
  source: /note="Description of Artificial Sequence: Synthetic oligonucleotide"
  source: /note="Description of Combined DNA/RNA Molecule: Synthetic oligonucleotide"
  modified_base (1)..(1): 2'-fluoro-nucleotide
  modified_base (2)..(2): 2'-fluoro-nucleotide
  modified_base (3)..(3): 2'-OMe-nucleotide
  modified_base (4)..(4): 2'-fluoro-nucleotide
  modified_base (5)..(5): 2'-OMe-nucleotide
  modified_base (6)..(6): 2'-fluoro-nucleotide
  modified_base (7)..(7): 2'-OMe-nucleotide
  modified_base (8)..(8): 2'-fluoro-nucleotide
  modified_base (9)..(9): 2'-OMe-nucleotide
  modified_base (10)..(10): 2'-fluoro-nucleotide
  modified_base (11)..(11): 2'-OMe-nucleotide
  modified_base (12)..(12): 2'-fluoro-nucleotide
  modified_base (13)..(13): 2'-OMe-nucleotide
  modified_base (14)..(14): 2'-fluoro-nucleotide
  modified_base (15)..(15): 2'-OMe-nucleotide
  modified_base (16)..(16): 2'-fluoro-nucleotide
  modified_base (17)..(17): 2'-OMe-nucleotide
  modified_base (18)..(18): 2'-fluoro-nucleotide
  modified_base (19)..(19): 2'-OMe-nucleotide
  modified_base (20)..(20): dT
  modified_base (21)..(21): dT
cuuugcucagucggugcuutt

SEQ ID NO: 955 - DNA, 21 bp, Artificial Sequence
  source: /note="Description of Artificial Sequence: Synthetic oligonucleotide"
  source: /note="Description of Combined DNA/RNA Molecule: Synthetic oligonucleotide"
  modified_base (1)..(1): 2'-fluoro-nucleotide
  modified_base (2)..(2): 2'-fluoro-nucleotide
  modified_base (3)..(3): 2'-OMe-nucleotide
  modified_base (4)..(4): 2'-fluoro-nucleotide
  modified_base (5)..(5): 2'-OMe-nucleotide
  modified_base (6)..(6): 2'-fluoro-nucleotide
  modified_base (7)..(7): 2'-OMe-nucleotide
  modified_base (8)..(8): 2'-fluoro-nucleotide
  modified_base (9)..(9): 2'-OMe-nucleotide
  modified_base (10)..(10): 2'-fluoro-nucleotide
  modified_base (11)..(11): 2'-OMe-nucleotide
  modified_base (12)..(12): 2'-fluoro-nucleotide
  modified_base (13)..(13): 2'-OMe-nucleotide
  modified_base (14)..(14): 2'-fluoro-nucleotide
  modified_base (15)..(15): 2'-OMe-nucleotide
  modified_base (16)..(16): 2'-fluoro-nucleotide
  modified_base (17)..(17): 2'-OMe-nucleotide
  modified_base (18)..(18): 2'-fluoro-nucleotide
  modified_base (19)..(19): 2'-OMe-nucleotide
  modified_base (20)..(20): dT
  modified_base (21)..(21): dT
ccuuugcucagucggugcutt

SEQ ID NO: 956 - DNA, 21 bp, Artificial Sequence
  source: /note="Description of Artificial Sequence: Synthetic oligonucleotide"
  source: /note="Description of Combined DNA/RNA Molecule: Synthetic oligonucleotide"
  modified_base (1)..(1): 2'-fluoro-nucleotide
  modified_base (2)..(2): 2'-fluoro-nucleotide
  modified_base (3)..(3): 2'-OMe-nucleotide
  modified_base (4)..(4): 2'-fluoro-nucleotide
  modified_base (5)..(5): 2'-OMe-nucleotide
  modified_base (6)..(6): 2'-fluoro-nucleotide
  modified_base (7)..(7): 2'-OMe-nucleotide
  modified_base (8)..(8): 2'-fluoro-nucleotide
  modified_base (9)..(9): 2'-OMe-nucleotide
  modified_base (10)..(10): 2'-fluoro-nucleotide
  modified_base (11)..(11): 2'-OMe-nucleotide
  modified_base (12)..(12): 2'-fluoro-nucleotide
  modified_base (13)..(13): 2'-OMe-nucleotide
  modified_base (14)..(14): 2'-fluoro-nucleotide
  modified_base (15)..(15): 2'-OMe-nucleotide
  modified_base (16)..(16): 2'-fluoro-nucleotide
  modified_base (17)..(17): 2'-OMe-nucleotide
  modified_base (18)..(18): 2'-fluoro-nucleotide
  modified_base (19)..(19): 2'-OMe-nucleotide
  modified_base (20)..(20): dT
  modified_base (21)..(21): dT
auaacucuguccauuaccatt

SEQ ID NO: 957 - DNA, 21 bp, Artificial Sequence
  source: /note="Description of Artificial Sequence: Synthetic oligonucleotide"
  source: /note="Description of Combined DNA/RNA Molecule: Synthetic oligonucleotide"
  modified_base (1)..(1): 2'-fluoro-nucleotide
  modified_base (2)..(2): 2'-fluoro-nucleotide
  modified_base (3)..(3): 2'-OMe-nucleotide
  modified_base (4)..(4): 2'-fluoro-nucleotide
  modified_base (5)..(5): 2'-OMe-nucleotide
  modified_base (6)..(6): 2'-fluoro-nucleotide
  modified_base (7)..(7): 2'-OMe-nucleotide
  modified_base (8)..(8): 2'-fluoro-nucleotide
  modified_base (9)..(9): 2'-OMe-nucleotide
  modified_base (10)..(10): 2'-fluoro-nucleotide
  modified_base (11)..(11): 2'-OMe-nucleotide
  modified_base (12)..(12): 2'-fluoro-nucleotide
  modified_base (13)..(13): 2'-OMe-nucleotide
  modified_base (14)..(14): 2'-fluoro-nucleotide
  modified_base (15)..(15): 2'-OMe-nucleotide
  modified_base (16)..(16): 2'-fluoro-nucleotide
  modified_base (17)..(17): 2'-OMe-nucleotide
  modified_base (18)..(18): 2'-fluoro-nucleotide
  modified_base (19)..(19): 2'-OMe-nucleotide
  modified_base (20)..(20): dT
  modified_base (21)..(21): dT
cgauaacucuguccauuactt

SEQ ID NO: 958 - DNA, 21 bp, Artificial Sequence
  source: /note="Description of Artificial Sequence: Synthetic oligonucleotide"
  source: /note="Description of Combined DNA/RNA Molecule: Synthetic oligonucleotide"
  modified_base (1)..(1): 2'-fluoro-nucleotide
  modified_base (2)..(2): 2'-fluoro-nucleotide
  modified_base (3)..(3): 2'-OMe-nucleotide
  modified_base (4)..(4): 2'-fluoro-nucleotide
  modified_base (5)..(5): 2'-OMe-nucleotide
  modified_base (6)..(6): 2'-fluoro-nucleotide
  modified_base (7)..(7): 2'-OMe-nucleotide
  modified_base (8)..(8): 2'-fluoro-nucleotide
  modified_base (9)..(9): 2'-OMe-nucleotide
  modified_base (10)..(10): 2'-fluoro-nucleotide
  modified_base (11)..(11): 2'-OMe-nucleotide
  modified_base (12)..(12): 2'-fluoro-nucleotide
  modified_base (13)..(13): 2'-OMe-nucleotide
  modified_base (14)..(14): 2'-fluoro-nucleotide
  modified_base (15)..(15): 2'-OMe-nucleotide
  modified_base (16)..(16): 2'-fluoro-nucleotide
  modified_base (17)..(17): 2'-OMe-nucleotide
  modified_base (18)..(18): 2'-fluoro-nucleotide
  modified_base (19)..(19): 2'-OMe-nucleotide
  modified_base (20)..(20): dT
  modified_base (21)..(21): dT
ucgauaacucuguccauuatt

SEQ ID NO: 959 - DNA, 21 bp, Artificial Sequence
  source: /note="Description of Artificial Sequence: Synthetic oligonucleotide"
  source: /note="Description of Combined DNA/RNA Molecule: Synthetic oligonucleotide"
  modified_base (1)..(1): 2'-fluoro-nucleotide
  modified_base (2)..(2): 2'-fluoro-nucleotide
  modified_base (3)..(3): 2'-OMe-nucleotide
  modified_base (4)..(4): 2'-fluoro-nucleotide
  modified_base (5)..(5): 2'-OMe-nucleotide
  modified_base (6)..(6): 2'-fluoro-nucleotide
  modified_base (7)..(7): 2'-OMe-nucleotide
  modified_base (8)..(8): 2'-fluoro-nucleotide
  modified_base (9)..(9): 2'-OMe-nucleotide
  modified_base (10)..(10): 2'-fluoro-nucleotide
  modified_base (11)..(11): 2'-OMe-nucleotide
  modified_base (12)..(12): 2'-fluoro-nucleotide
  modified_base (13)..(13): 2'-OMe-nucleotide
  modified_base (14)..(14): 2'-fluoro-nucleotide
  modified_base (15)..(15): 2'-OMe-nucleotide
  modified_base (16)..(16): 2'-fluoro-nucleotide
  modified_base (17)..(17): 2'-OMe-nucleotide
  modified_base (18)..(18): 2'-fluoro-nucleotide
  modified_base (19)..(19): 2'-OMe-nucleotide
  modified_base (20)..(20): dT
  modified_base (21)..(21): dT
uaugugccucgauaacucutt

SEQ ID NO: 960 - DNA, 21 bp, Artificial Sequence
  source: /note="Description of Artificial Sequence: Synthetic oligonucleotide"
  source: /note="Description of Combined DNA/RNA Molecule: Synthetic oligonucleotide"
  modified_base (1)..(1): 2'-fluoro-nucleotide
  modified_base (2)..(2): 2'-fluoro-nucleotide
  modified_base (3)..(3): 2'-OMe-nucleotide
  modified_base (4)..(4): 2'-fluoro-nucleotide
  modified_base (5)..(5): 2'-OMe-nucleotide
  modified_base (6)..(6): 2'-fluoro-nucleotide
  modified_base (7)..(7): 2'-OMe-nucleotide
  modified_base (8)..(8): 2'-fluoro-nucleotide
  modified_base (9)..(9): 2'-OMe-nucleotide
  modified_base (10)..(10): 2'-fluoro-nucleotide
  modified_base (11)..(11): 2'-OMe-nucleotide
  modified_base (12)..(12): 2'-fluoro-nucleotide
  modified_base (13)..(13): 2'-OMe-nucleotide
  modified_base (14)..(14): 2'-fluoro-nucleotide
  modified_base (15)..(15): 2'-OMe-nucleotide
  modified_base (16)..(16): 2'-fluoro-nucleotide
  modified_base (17)..(17): 2'-OMe-nucleotide
  modified_base (18)..(18): 2'-fluoro-nucleotide
  modified_base (19)..(19): 2'-OMe-nucleotide
  modified_base (20)..(20): dT
  modified_base (21)..(21): dT
guaugugccucgauaacuctt

SEQ ID NO: 961 - DNA, 21 bp, Artificial Sequence
  source: /note="Description of Artificial Sequence: Synthetic oligonucleotide"
  source: /note="Description of Combined DNA/RNA Molecule: Synthetic oligonucleotide"
  modified_base (1)..(1): 2'-fluoro-nucleotide
  modified_base (2)..(2): 2'-fluoro-nucleotide
  modified_base (3)..(3): 2'-OMe-nucleotide
  modified_base (4)..(4): 2'-fluoro-nucleotide
  modified_base (5)..(5): 2'-OMe-nucleotide
  modified_base (6)..(6): 2'-fluoro-nucleotide
  modified_base (7)..(7): 2'-OMe-nucleotide
  modified_base (8)..(8): 2'-fluoro-nucleotide
  modified_base (9)..(9): 2'-OMe-nucleotide
  modified_base (10)..(10): 2'-fluoro-nucleotide
  modified_base (11)..(11): 2'-OMe-nucleotide
  modified_base (12)..(12): 2'-fluoro-nucleotide
  modified_base (13)..(13): 2'-OMe-nucleotide
  modified_base (14)..(14): 2'-fluoro-nucleotide
  modified_base (15)..(15): 2'-OMe-nucleotide
  modified_base (16)..(16): 2'-fluoro-nucleotide
  modified_base (17)..(17): 2'-OMe-nucleotide
  modified_base (18)..(18): 2'-fluoro-nucleotide
  modified_base (19)..(19): 2'-OMe-nucleotide
  modified_base (20)..(20): dT
  modified_base (21)..(21): dT
aguaugugccucgauaacutt

SEQ ID NO: 962 - DNA, 21 bp, Artificial Sequence
  source: /note="Description of Artificial Sequence: Synthetic oligonucleotide"
  source: /note="Description of Combined DNA/RNA Molecule: Synthetic oligonucleotide"
  modified_base (1)..(1): 2'-fluoro-nucleotide
  modified_base (2)..(2): 2'-fluoro-nucleotide
  modified_base (3)..(3): 2'-OMe-nucleotide
  modified_base (4)..(4): 2'-fluoro-nucleotide
  modified_base (5)..(5): 2'-OMe-nucleotide
  modified_base (6)..(6): 2'-fluoro-nucleotide
  modified_base (7)..(7): 2'-OMe-nucleotide
  modified_base (8)..(8): 2'-fluoro-nucleotide
  modified_base (9)..(9): 2'-OMe-nucleotide
  modified_base (10)..(10): 2'-fluoro-nucleotide
  modified_base (11)..(11): 2'-OMe-nucleotide
  modified_base (12)..(12): 2'-fluoro-nucleotide
  modified_base (13)..(13): 2'-OMe-nucleotide
  modified_base (14)..(14): 2'-fluoro-nucleotide
  modified_base (15)..(15): 2'-OMe-nucleotide
  modified_base (16)..(16): 2'-fluoro-nucleotide
  modified_base (17)..(17): 2'-OMe-nucleotide
  modified_base (18)..(18): 2'-fluoro-nucleotide
  modified_base (19)..(19): 2'-OMe-nucleotide
  modified_base (20)..(20): dT
  modified_base (21)..(21): dT
gaguaugugccucgauaactt

SEQ ID NO: 963 - DNA, 21 bp, Artificial Sequence
  source: /note="Description of Artificial Sequence: Synthetic oligonucleotide"
  source: /note="Description of Combined DNA/RNA Molecule: Synthetic oligonucleotide"
  modified_base (1)..(1): 2'-fluoro-nucleotide
  modified_base (2)..(2): 2'-fluoro-nucleotide
  modified_base (3)..(3): 2'-OMe-nucleotide
  modified_base (4)..(4): 2'-fluoro-nucleotide
  modified_base (5)..(5): 2'-OMe-nucleotide
  modified_base (6)..(6): 2'-fluoro-nucleotide
  modified_base (7)..(7): 2'-OMe-nucleotide
  modified_base (8)..(8): 2'-fluoro-nucleotide
  modified_base (9)..(9): 2'-OMe-nucleotide
  modified_base (10)..(10): 2'-fluoro-nucleotide
  modified_base (11)..(11): 2'-OMe-nucleotide
  modified_base (12)..(12): 2'-fluoro-nucleotide
  modified_base (13)..(13): 2'-OMe-nucleotide
  modified_base (14)..(14): 2'-fluoro-nucleotide
  modified_base (15)..(15): 2'-OMe-nucleotide
  modified_base (16)..(16): 2'-fluoro-nucleotide
  modified_base (17)..(17): 2'-OMe-nucleotide
  modified_base (18)..(18): 2'-fluoro-nucleotide
  modified_base (19)..(19): 2'-OMe-nucleotide
  modified_base (20)..(20): dT
  modified_base (21)..(21): dT
ggaguaugugccucgauaatt

SEQ ID NO: 964 - DNA, 21 bp, Artificial Sequence
  source: /note="Description of Artificial Sequence: Synthetic oligonucleotide"
  source: /note="Description of Combined DNA/RNA Molecule: Synthetic oligonucleotide"
  modified_base (1)..(1): 2'-fluoro-nucleotide
  modified_base (2)..(2): 2'-fluoro-nucleotide
  modified_base (3)..(3): 2'-OMe-nucleotide
  modified_base (4)..(4): 2'-fluoro-nucleotide
  modified_base (5)..(5): 2'-OMe-nucleotide
  modified_base (6)..(6): 2'-fluoro-nucleotide
  modified_base (7)..(7): 2'-OMe-nucleotide
  modified_base (8)..(8): 2'-fluoro-nucleotide
  modified_base (9)..(9): 2'-OMe-nucleotide
  modified_base (10)..(10): 2'-fluoro-nucleotide
  modified_base (11)..(11): 2'-OMe-nucleotide
  modified_base (12)..(12): 2'-fluoro-nucleotide
  modified_base (13)..(13): 2'-OMe-nucleotide
  modified_base (14)..(14): 2'-fluoro-nucleotide
  modified_base (15)..(15): 2'-OMe-nucleotide
  modified_base (16)..(16): 2'-fluoro-nucleotide
  modified_base (17)..(17): 2'-OMe-nucleotide
  modified_base (18)..(18): 2'-fluoro-nucleotide
  modified_base (19)..(19): 2'-OMe-nucleotide
  modified_base (20)..(20): dT
  modified_base (21)..(21): dT
cagugguggaguaugugcctt

SEQ ID NO: 965 - DNA, 21 bp, Artificial Sequence
  source: /note="Description of Artificial Sequence: Synthetic oligonucleotide"
  source: /note="Description of Combined DNA/RNA Molecule: Synthetic oligonucleotide"
  modified_base (1)..(1): 2'-fluoro-nucleotide
  modified_base (2)..(2): 2'-fluoro-nucleotide
  modified_base (3)..(3): 2'-OMe-nucleotide
  modified_base (4)..(4): 2'-fluoro-nucleotide
  modified_base (5)..(5): 2'-OMe-nucleotide
  modified_base (6)..(6): 2'-fluoro-nucleotide
  modified_base (7)..(7): 2'-OMe-nucleotide
  modified_base (8)..(8): 2'-fluoro-nucleotide
  modified_base (9)..(9): 2'-OMe-nucleotide
  modified_base (10)..(10): 2'-fluoro-nucleotide
  modified_base (11)..(11): 2'-OMe-nucleotide
  modified_base (12)..(12): 2'-fluoro-nucleotide
  modified_base (13)..(13): 2'-OMe-nucleotide
  modified_base (14)..(14): 2'-fluoro-nucleotide
  modified_base (15)..(15): 2'-OMe-nucleotide
  modified_base (16)..(16): 2'-fluoro-nucleotide
  modified_base (17)..(17): 2'-OMe-nucleotide
  modified_base (18)..(18): 2'-fluoro-nucleotide
  modified_base (19)..(19): 2'-OMe-nucleotide
  modified_base (20)..(20): dT
  modified_base (21)..(21): dT
gugacagugguggaguaugtt

SEQ ID NO: 966 - DNA, 21 bp, Artificial Sequence
  source: /note="Description of Artificial Sequence: Synthetic oligonucleotide"
  source: /note="Description of Combined DNA/RNA Molecule: Synthetic oligonucleotide"
  modified_base (1)..(1): 2'-fluoro-nucleotide
  modified_base (2)..(2): 2'-fluoro-nucleotide
  modified_base (3)..(3): 2'-OMe-nucleotide
  modified_base (4)..(4): 2'-fluoro-nucleotide
  modified_base (5)..(5): 2'-OMe-nucleotide
  modified_base (6)..(6): 2'-fluoro-nucleotide
  modified_base (7)..(7): 2'-OMe-nucleotide
  modified_base (8)..(8): 2'-fluoro-nucleotide
  modified_base (9)..(9): 2'-OMe-nucleotide
  modified_base (10)..(10): 2'-fluoro-nucleotide
  modified_base (11)..(11): 2'-OMe-nucleotide
  modified_base (12)..(12): 2'-fluoro-nucleotide
  modified_base (13)..(13): 2'-OMe-nucleotide
  modified_base (14)..(14): 2'-fluoro-nucleotide
  modified_base (15)..(15): 2'-OMe-nucleotide
  modified_base (16)..(16): 2'-fluoro-nucleotide
  modified_base (17)..(17): 2'-OMe-nucleotide
  modified_base (18)..(18): 2'-fluoro-nucleotide
  modified_base (19)..(19): 2'-OMe-nucleotide
  modified_base (20)..(20): dT
  modified_base (21)..(21): dT
aagcuuggcagguucuucctt

SEQ ID NO: 967 - DNA, 21 bp, Artificial Sequence
  source: /note="Description of Artificial Sequence: Synthetic oligonucleotide"
  source: /note="Description of Combined DNA/RNA Molecule: Synthetic oligonucleotide"
  modified_base (1)..(1): 2'-fluoro-nucleotide
  modified_base (2)..(2): 2'-fluoro-nucleotide
  modified_base (3)..(3): 2'-OMe-nucleotide
  modified_base (4)..(4): 2'-fluoro-nucleotide
  modified_base (5)..(5): 2'-OMe-nucleotide
  modified_base (6)..(6): 2'-fluoro-nucleotide
  modified_base (7)..(7): 2'-OMe-nucleotide
  modified_base (8)..(8): 2'-fluoro-nucleotide
  modified_base (9)..(9): 2'-OMe-nucleotide
  modified_base (10)..(10): 2'-fluoro-nucleotide
  modified_base (11)..(11): 2'-OMe-nucleotide
  modified_base (12)..(12): 2'-fluoro-nucleotide
  modified_base (13)..(13): 2'-OMe-nucleotide
  modified_base (14)..(14): 2'-fluoro-nucleotide
  modified_base (15)..(15): 2'-OMe-nucleotide
  modified_base (16)..(16): 2'-fluoro-nucleotide
  modified_base (17)..(17): 2'-OMe-nucleotide
  modified_base (18)..(18): 2'-fluoro-nucleotide
  modified_base (19)..(19): 2'-OMe-nucleotide
  modified_base (20)..(20): dT
  modified_base (21)..(21): dT
augcgaguguggugucauatt

SEQ ID NO: 968 - DNA, 21 bp, Artificial Sequence
  source: /note="Description of Artificial Sequence: Synthetic oligonucleotide"
  source: /note="Description of Combined DNA/RNA Molecule: Synthetic oligonucleotide"
  modified_base (1)..(1): 2'-fluoro-nucleotide
  modified_base (2)..(2): 2'-fluoro-nucleotide
  modified_base (3)..(3): 2'-OMe-nucleotide
  modified_base (4)..(4): 2'-fluoro-nucleotide
  modified_base (5)..(5): 2'-OMe-nucleotide
  modified_base (6)..(6): 2'-fluoro-nucleotide
  modified_base (7)..(7): 2'-OMe-nucleotide
  modified_base (8)..(8): 2'-fluoro-nucleotide
  modified_base (9)..(9): 2'-OMe-nucleotide
  modified_base (10)..(10): 2'-fluoro-nucleotide
  modified_base (11)..(11): 2'-OMe-nucleotide
  modified_base (12)..(12): 2'-fluoro-nucleotide
  modified_base (13)..(13): 2'-OMe-nucleotide
  modified_base (14)..(14): 2'-fluoro-nucleotide
  modified_base (15)..(15): 2'-OMe-nucleotide
  modified_base (16)..(16): 2'-fluoro-nucleotide
  modified_base (17)..(17): 2'-OMe-nucleotide
  modified_base (18)..(18): 2'-fluoro-nucleotide
  modified_base (19)..(19): 2'-OMe-nucleotide
  modified_base (20)..(20): dT
  modified_base (21)..(21): dT
uaugcgaguguggugucautt

SEQ ID NO: 969 - DNA, 21 bp, Artificial Sequence
  source: /note="Description of Artificial Sequence: Synthetic oligonucleotide"
  source: /note="Description of Combined DNA/RNA Molecule: Synthetic oligonucleotide"
  modified_base (1)..(1): 2'-fluoro-nucleotide
  modified_base (2)..(2): 2'-fluoro-nucleotide
  modified_base (3)..(3): 2'-OMe-nucleotide
  modified_base (4)..(4): 2'-fluoro-nucleotide
  modified_base (5)..(5): 2'-OMe-nucleotide
  modified_base (6)..(6): 2'-fluoro-nucleotide
  modified_base (7)..(7): 2'-OMe-nucleotide
  modified_base (8)..(8): 2'-fluoro-nucleotide
  modified_base (9)..(9): 2'-OMe-nucleotide
  modified_base (10)..(10): 2'-fluoro-nucleotide
  modified_base (11)..(11): 2'-OMe-nucleotide
  modified_base (12)..(12): 2'-fluoro-nucleotide
  modified_base (13)..(13): 2'-OMe-nucleotide
  modified_base (14)..(14): 2'-fluoro-nucleotide
  modified_base (15)..(15): 2'-OMe-nucleotide
  modified_base (16)..(16): 2'-fluoro-nucleotide
  modified_base (17)..(17): 2'-OMe-nucleotide
  modified_base (18)..(18): 2'-fluoro-nucleotide
  modified_base (19)..(19): 2'-OMe-nucleotide
  modified_base (20)..(20): dT
  modified_base (21)..(21): dT
cuaugcgaguguggugucatt

SEQ ID NO: 970 - DNA, 21 bp, Artificial Sequence
  source: /note="Description of Artificial Sequence: Synthetic oligonucleotide"
  source: /note="Description of Combined DNA/RNA Molecule: Synthetic oligonucleotide"
  modified_base (1)..(1): 2'-fluoro-nucleotide
  modified_base (2)..(2): 2'-fluoro-nucleotide
  modified_base (3)..(3): 2'-OMe-nucleotide
  modified_base (4)..(4): 2'-fluoro-nucleotide
  modified_base (5)..(5): 2'-OMe-nucleotide
  modified_base (6)..(6): 2'-fluoro-nucleotide
  modified_base (7)..(7): 2'-OMe-nucleotide
  modified_base (8)..(8): 2'-fluoro-nucleotide
  modified_base (9)..(9): 2'-OMe-nucleotide
  modified_base (10)..(10): 2'-fluoro-nucleotide
  modified_base (11)..(11): 2'-OMe-nucleotide
  modified_base (12)..(12): 2'-fluoro-nucleotide
  modified_base (13)..(13): 2'-OMe-nucleotide
  modified_base (14)..(14): 2'-fluoro-nucleotide
  modified_base (15)..(15): 2'-OMe-nucleotide
  modified_base (16)..(16): 2'-fluoro-nucleotide
  modified_base (17)..(17): 2'-OMe-nucleotide
  modified_base (18)..(18): 2'-fluoro-nucleotide
  modified_base (19)..(19): 2'-OMe-nucleotide
  modified_base (20)..(20): dT
  modified_base (21)..(21): dT
acuaugcgagugugguguctt

SEQ ID NO: 971 - DNA, 21 bp, Artificial Sequence
  source: /note="Description of Artificial Sequence: Synthetic oligonucleotide"
  source: /note="Description of Combined DNA/RNA Molecule: Synthetic oligonucleotide"
  modified_base (1)..(1): 2'-fluoro-nucleotide
  modified_base (2)..(2): 2'-fluoro-nucleotide
  modified_base (3)..(3): 2'-OMe-nucleotide
  modified_base (4)..(4): 2'-fluoro-nucleotide
  modified_base (5)..(5): 2'-OMe-nucleotide
  modified_base (6)..(6): 2'-fluoro-nucleotide
  modified_base (7)..(7): 2'-OMe-nucleotide
  modified_base (8)..(8): 2'-fluoro-nucleotide
  modified_base (9)..(9): 2'-OMe-nucleotide
  modified_base (10)..(10): 2'-fluoro-nucleotide
  modified_base (11)..(11): 2'-OMe-nucleotide
  modified_base (12)..(12): 2'-fluoro-nucleotide
  modified_base (13)..(13): 2'-OMe-nucleotide
  modified_base (14)..(14): 2'-fluoro-nucleotide
  modified_base (15)..(15): 2'-OMe-nucleotide
  modified_base (16)..(16): 2'-fluoro-nucleotide
  modified_base (17)..(17): 2'-OMe-nucleotide
  modified_base (18)..(18): 2'-fluoro-nucleotide
  modified_base (19)..(19): 2'-OMe-nucleotide
  modified_base (20)..(20): dT
  modified_base (21)..(21): dT
gacuaugcgaguguggugutt

SEQ ID NO: 972 - DNA, 21 bp, Artificial Sequence
  source: /note="Description of Artificial Sequence: Synthetic oligonucleotide"
  source: /note="Description of Combined DNA/RNA Molecule: Synthetic oligonucleotide"
  modified_base (1)..(1): 2'-fluoro-nucleotide
  modified_base (2)..(2): 2'-fluoro-nucleotide
  modified_base (3)..(3): 2'-OMe-nucleotide
  modified_base (4)..(4): 2'-fluoro-nucleotide
  modified_base (5)..(5): 2'-OMe-nucleotide
  modified_base (6)..(6): 2'-fluoro-nucleotide
  modified_base (7)..(7): 2'-OMe-nucleotide
  modified_base (8)..(8): 2'-fluoro-nucleotide
  modified_base (9)..(9): 2'-OMe-nucleotide
  modified_base (10)..(10): 2'-fluoro-nucleotide
  modified_base (11)..(11): 2'-OMe-nucleotide
  modified_base (12)..(12): 2'-fluoro-nucleotide
  modified_base (13)..(13): 2'-OMe-nucleotide
  modified_base (14)..(14): 2'-fluoro-nucleotide
  modified_base (15)..(15): 2'-OMe-nucleotide
  modified_base (16)..(16): 2'-fluoro-nucleotide
  modified_base (17)..(17): 2'-OMe-nucleotide
  modified_base (18)..(18): 2'-fluoro-nucleotide
  modified_base (19)..(19): 2'-OMe-nucleotide
  modified_base (20)..(20): dT
  modified_base (21)..(21): dT
ccgacuaugcgaguguggutt

SEQ ID NO: 973 - DNA, 21 bp, Artificial Sequence
  source: /note="Description of Artificial Sequence: Synthetic oligonucleotide"
  source: /note="Description of Combined DNA/RNA Molecule: Synthetic oligonucleotide"
  modified_base (1)..(1): 2'-fluoro-nucleotide
  modified_base (2)..(2): 2'-fluoro-nucleotide
  modified_base (3)..(3): 2'-OMe-nucleotide
  modified_base (4)..(4): 2'-fluoro-nucleotide
  modified_base (5)..(5): 2'-OMe-nucleotide
  modified_base (6)..(6): 2'-fluoro-nucleotide
  modified_base (7)..(7): 2'-OMe-nucleotide
  modified_base (8)..(8): 2'-fluoro-nucleotide
  modified_base (9)..(9): 2'-OMe-nucleotide
  modified_base (10)..(10): 2'-fluoro-nucleotide
  modified_base (11)..(11): 2'-OMe-nucleotide
  modified_base (12)..(12): 2'-fluoro-nucleotide
  modified_base (13)..(13): 2'-OMe-nucleotide
  modified_base (14)..(14): 2'-fluoro-nucleotide
  modified_base (15)..(15): 2'-OMe-nucleotide
  modified_base (16)..(16): 2'-fluoro-nucleotide
  modified_base (17)..(17): 2'-OMe-nucleotide
  modified_base (18)..(18): 2'-fluoro-nucleotide
  modified_base (19)..(19): 2'-OMe-nucleotide
  modified_base (20)..(20): dT
  modified_base (21)..(21): dT
uccgacuaugcgaguguggtt

SEQ ID NO: 974 - DNA, 21 bp, Artificial Sequence
  source: /note="Description of Artificial Sequence: Synthetic oligonucleotide"
  source: /note="Description of Combined DNA/RNA Molecule: Synthetic oligonucleotide"
  modified_base (1)..(1): 2'-fluoro-nucleotide
  modified_base (2)..(2): 2'-fluoro-nucleotide
  modified_base (3)..(3): 2'-OMe-nucleotide
  modified_base (4)..(4): 2'-fluoro-nucleotide
  modified_base (5)..(5): 2'-OMe-nucleotide
  modified_base (6)..(6): 2'-fluoro-nucleotide
  modified_base (7)..(7): 2'-OMe-nucleotide
  modified_base (8)..(8): 2'-fluoro-nucleotide
  modified_base (9)..(9): 2'-OMe-nucleotide
  modified_base (10)..(10): 2'-fluoro-nucleotide
  modified_base (11)..(11): 2'-OMe-nucleotide
  modified_base (12)..(12): 2'-fluoro-nucleotide
  modified_base (13)..(13): 2'-OMe-nucleotide
  modified_base (14)..(14): 2'-fluoro-nucleotide
  modified_base (15)..(15): 2'-OMe-nucleotide
  modified_base (16)..(16): 2'-fluoro-nucleotide
  modified_base (17)..(17): 2'-OMe-nucleotide
  modified_base (18)..(18): 2'-fluoro-nucleotide
  modified_base (19)..(19): 2'-OMe-nucleotide
  modified_base (20)..(20): dT
  modified_base (21)..(21): dT
guccgacuaugcgagugugtt

SEQ ID NO: 975 - DNA, 21 bp, Artificial Sequence
  source: /note="Description of Artificial Sequence: Synthetic oligonucleotide"
  source: /note="Description of Combined DNA/RNA Molecule: Synthetic oligonucleotide"
  modified_base (1)..(1): 2'-fluoro-nucleotide
  modified_base (2)..(2): 2'-fluoro-nucleotide
  modified_base (3)..(3): 2'-OMe-nucleotide
  modified_base (4)..(4): 2'-fluoro-nucleotide
  modified_base (5)..(5): 2'-OMe-nucleotide
  modified_base (6)..(6): 2'-fluoro-nucleotide
  modified_base (7)..(7): 2'-OMe-nucleotide
  modified_base (8)..(8): 2'-fluoro-nucleotide
  modified_base (9)..(9): 2'-OMe-nucleotide
  modified_base (10)..(10): 2'-fluoro-nucleotide
  modified_base (11)..(11): 2'-OMe-nucleotide
  modified_base (12)..(12): 2'-fluoro-nucleotide
  modified_base (13)..(13): 2'-OMe-nucleotide
  modified_base (14)..(14): 2'-fluoro-nucleotide
  modified_base (15)..(15): 2'-OMe-nucleotide
  modified_base (16)..(16): 2'-fluoro-nucleotide
  modified_base (17)..(17): 2'-OMe-nucleotide
  modified_base (18)..(18): 2'-fluoro-nucleotide
  modified_base (19)..(19): 2'-OMe-nucleotide
  modified_base (20)..(20): dT
  modified_base (21)..(21): dT
gguccgacuaugcgagugutt

SEQ ID NO: 976 - DNA, 21 bp, Artificial Sequence
  source: /note="Description of Artificial Sequence: Synthetic oligonucleotide"
  source: /note="Description of Combined DNA/RNA Molecule: Synthetic oligonucleotide"
  modified_base (1)..(1): 2'-fluoro-nucleotide
  modified_base (2)..(2): 2'-fluoro-nucleotide
  modified_base (3)..(3): 2'-OMe-nucleotide
  modified_base (4)..(4): 2'-fluoro-nucleotide
  modified_base (5)..(5): 2'-OMe-nucleotide
  modified_base (6)..(6): 2'-fluoro-nucleotide
  modified_base (7)..(7): 2'-OMe-nucleotide
  modified_base (8)..(8): 2'-fluoro-nucleotide
  modified_base (9)..(9): 2'-OMe-nucleotide
  modified_base (10)..(10): 2'-fluoro-nucleotide
  modified_base (11)..(11): 2'-OMe-nucleotide
  modified_base (12)..(12): 2'-fluoro-nucleotide
  modified_base (13)..(13): 2'-OMe-nucleotide
  modified_base (14)..(14): 2'-fluoro-nucleotide
  modified_base (15)..(15): 2'-OMe-nucleotide
  modified_base (16)..(16): 2'-fluoro-nucleotide
  modified_base (17)..(17): 2'-OMe-nucleotide
  modified_base (18)..(18): 2'-fluoro-nucleotide
  modified_base (19)..(19): 2'-OMe-nucleotide
  modified_base (20)..(20): dT
  modified_base (21)..(21): dT
auucugggguccgacuaugtt

SEQ ID NO: 977 - DNA, 21 bp, Artificial Sequence
  source: /note="Description of Artificial Sequence: Synthetic oligonucleotide"
  source: /note="Description of Combined DNA/RNA Molecule: Synthetic oligonucleotide"
  modified_base (1)..(1): 2'-fluoro-nucleotide
  modified_base (2)..(2): 2'-fluoro-nucleotide
  modified_base (3)..(3): 2'-OMe-nucleotide
  modified_base (4)..(4): 2'-fluoro-nucleotide
  modified_base (5)..(5): 2'-OMe-nucleotide
  modified_base (6)..(6): 2'-fluoro-nucleotide
  modified_base (7)..(7): 2'-OMe-nucleotide
  modified_base (8)..(8): 2'-fluoro-nucleotide
  modified_base (9)..(9): 2'-OMe-nucleotide
  modified_base (10)..(10): 2'-fluoro-nucleotide
  modified_base (11)..(11): 2'-OMe-nucleotide
  modified_base (12)..(12): 2'-fluoro-nucleotide
  modified_base (13)..(13): 2'-OMe-nucleotide
  modified_base (14)..(14): 2'-fluoro-nucleotide
  modified_base (15)..(15): 2'-OMe-nucleotide
  modified_base (16)..(16): 2'-fluoro-nucleotide
  modified_base (17)..(17): 2'-OMe-nucleotide
  modified_base (18)..(18): 2'-fluoro-nucleotide
  modified_base (19)..(19): 2'-OMe-nucleotide
  modified_base (20)..(20): dT
  modified_base (21)..(21): dT
uauucugggguccgacuautt

SEQ ID NO: 978 - DNA, 21 bp, Artificial Sequence
  source: /note="Description of Artificial Sequence: Synthetic oligonucleotide"
  source: /note="Description of Combined DNA/RNA Molecule: Synthetic oligonucleotide"
  modified_base (1)..(1): 2'-fluoro-nucleotide
  modified_base (2)..(2): 2'-fluoro-nucleotide
  modified_base (3)..(3): 2'-OMe-nucleotide
  modified_base (4)..(4): 2'-fluoro-nucleotide
  modified_base (5)..(5): 2'-OMe-nucleotide
  modified_base (6)..(6): 2'-fluoro-nucleotide
  modified_base (7)..(7): 2'-OMe-nucleotide
  modified_base (8)..(8): 2'-fluoro-nucleotide
  modified_base (9)..(9): 2'-OMe-nucleotide
  modified_base (10)..(10): 2'-fluoro-nucleotide
  modified_base (11)..(11): 2'-OMe-nucleotide
  modified_base (12)..(12): 2'-fluoro-nucleotide
  modified_base (13)..(13): 2'-OMe-nucleotide
  modified_base (14)..(14): 2'-fluoro-nucleotide
  modified_base (15)..(15): 2'-OMe-nucleotide
  modified_base (16)..(16): 2'-fluoro-nucleotide
  modified_base (17)..(17): 2'-OMe-nucleotide
  modified_base (18)..(18): 2'-fluoro-nucleotide
  modified_base (19)..(19): 2'-OMe-nucleotide
  modified_base (20)..(20): dT
  modified_base (21)..(21): dT
guauucugggguccgacuatt

SEQ ID NO: 979 - DNA, 21 bp, Artificial Sequence
  source: /note="Description of Artificial Sequence: Synthetic oligonucleotide"
  source: /note="Description of Combined DNA/RNA Molecule: Synthetic oligonucleotide"
  modified_base (1)..(1): 2'-fluoro-nucleotide
  modified_base (2)..(2): 2'-fluoro-nucleotide
  modified_base (3)..(3): 2'-OMe-nucleotide
  modified_base (4)..(4): 2'-fluoro-nucleotide
  modified_base (5)..(5): 2'-OMe-nucleotide
  modified_base (6)..(6): 2'-fluoro-nucleotide
  modified_base (7)..(7): 2'-OMe-nucleotide
  modified_base (8)..(8): 2'-fluoro-nucleotide
  modified_base (9)..(9): 2'-OMe-nucleotide
  modified_base (10)..(10): 2'-fluoro-nucleotide
  modified_base (11)..(11): 2'-OMe-nucleotide
  modified_base (12)..(12): 2'-fluoro-nucleotide
  modified_base (13)..(13): 2'-OMe-nucleotide
  modified_base (14)..(14): 2'-fluoro-nucleotide
  modified_base (15)..(15): 2'-OMe-nucleotide
  modified_base (16)..(16): 2'-fluoro-nucleotide
  modified_base (17)..(17): 2'-OMe-nucleotide
  modified_base (18)..(18): 2'-fluoro-nucleotide
  modified_base (19)..(19): 2'-OMe-nucleotide
  modified_base (20)..(20): dT
  modified_base (21)..(21): dT
aguauucugggguccgacutt

SEQ ID NO: 980 - DNA, 21 bp, Artificial Sequence
  source: /note="Description of Artificial Sequence: Synthetic oligonucleotide"
  source: /note="Description of Combined DNA/RNA Molecule: Synthetic oligonucleotide"
  modified_base (1)..(1): 2'-fluoro-nucleotide
  modified_base (2)..(2): 2'-fluoro-nucleotide
  modified_base (3)..(3): 2'-OMe-nucleotide
  modified_base (4)..(4): 2'-fluoro-nucleotide
  modified_base (5)..(5): 2'-OMe-nucleotide
  modified_base (6)..(6): 2'-fluoro-nucleotide
  modified_base (7)..(7): 2'-OMe-nucleotide
  modified_base (8)..(8): 2'-fluoro-nucleotide
  modified_base (9)..(9): 2'-OMe-nucleotide
  modified_base (10)..(10): 2'-fluoro-nucleotide
  modified_base (11)..(11): 2'-OMe-nucleotide
  modified_base (12)..(12): 2'-fluoro-nucleotide
  modified_base (13)..(13): 2'-OMe-nucleotide
  modified_base (14)..(14): 2'-fluoro-nucleotide
  modified_base (15)..(15): 2'-OMe-nucleotide
  modified_base (16)..(16): 2'-fluoro-nucleotide
  modified_base (17)..(17): 2'-OMe-nucleotide
  modified_base (18)..(18): 2'-fluoro-nucleotide
  modified_base (19)..(19): 2'-OMe-nucleotide
  modified_base (20)..(20): dT
  modified_base (21)..(21): dT
uaguauucugggguccgactt

SEQ ID NO: 981 - DNA, 21 bp, Artificial Sequence
  source: /note="Description of Artificial Sequence: Synthetic oligonucleotide"
  source: /note="Description of Combined DNA/RNA Molecule: Synthetic oligonucleotide"
  modified_base (1)..(1): 2'-fluoro-nucleotide
  modified_base (2)..(2): 2'-fluoro-nucleotide
  modified_base (3)..(3): 2'-OMe-nucleotide
  modified_base (4)..(4): 2'-fluoro-nucleotide
  modified_base (5)..(5): 2'-OMe-nucleotide
  modified_base (6)..(6): 2'-fluoro-nucleotide
  modified_base (7)..(7): 2'-OMe-nucleotide
  modified_base (8)..(8): 2'-fluoro-nucleotide
  modified_base (9)..(9): 2'-OMe-nucleotide
  modified_base (10)..(10): 2'-fluoro-nucleotide
  modified_base (11)..(11): 2'-OMe-nucleotide
  modified_base (12)..(12): 2'-fluoro-nucleotide
  modified_base (13)..(13): 2'-OMe-nucleotide
  modified_base (14)..(14): 2'-fluoro-nucleotide
  modified_base (15)..(15): 2'-OMe-nucleotide
  modified_base (16)..(16): 2'-fluoro-nucleotide
  modified_base (17)..(17): 2'-OMe-nucleotide
  modified_base (18)..(18): 2'-fluoro-nucleotide
  modified_base (19)..(19): 2'-OMe-nucleotide
  modified_base (20)..(20): dT
  modified_base (21)..(21): dT
guaguauucugggguccgatt

SEQ ID NO: 982 - DNA, 21 bp, Artificial Sequence
  source: /note="Description of Artificial Sequence: Synthetic oligonucleotide"
  source: /note="Description of Combined DNA/RNA Molecule: Synthetic oligonucleotide"
  modified_base (1)..(1): 2'-fluoro-nucleotide
  modified_base (2)..(2): 2'-fluoro-nucleotide
  modified_base (3)..(3): 2'-OMe-nucleotide
  modified_base (4)..(4): 2'-fluoro-nucleotide
  modified_base (5)..(5): 2'-OMe-nucleotide
  modified_base (6)..(6): 2'-fluoro-nucleotide
  modified_base (7)..(7): 2'-OMe-nucleotide
  modified_base (8)..(8): 2'-fluoro-nucleotide
  modified_base (9)..(9): 2'-OMe-nucleotide
  modified_base (10)..(10): 2'-fluoro-nucleotide
  modified_base (11)..(11): 2'-OMe-nucleotide
  modified_base (12)..(12): 2'-fluoro-nucleotide
  modified_base (13)..(13): 2'-OMe-nucleotide
  modified_base (14)..(14): 2'-fluoro-nucleotide
  modified_base (15)..(15): 2'-OMe-nucleotide
  modified_base (16)..(16): 2'-fluoro-nucleotide
  modified_base (17)..(17): 2'-OMe-nucleotide
  modified_base (18)..(18): 2'-fluoro-nucleotide
  modified_base (19)..(19): 2'-OMe-nucleotide
  modified_base (20)..(20): dT
  modified_base (21)..(21): dT
gguaguauucugggguccgtt

SEQ ID NO: 983 - DNA, 21 bp, Artificial Sequence
  source: /note="Description of Artificial Sequence: Synthetic oligonucleotide"
  source: /note="Description of Combined DNA/RNA Molecule: Synthetic oligonucleotide"
  modified_base (1)..(1): 2'-fluoro-nucleotide
  modified_base (2)..(2): 2'-fluoro-nucleotide
  modified_base (3)..(3): 2'-OMe-nucleotide
  modified_base (4)..(4): 2'-fluoro-nucleotide
  modified_base (5)..(5): 2'-OMe-nucleotide
  modified_base (6)..(6): 2'-fluoro-nucleotide
  modified_base (7)..(7): 2'-OMe-nucleotide
  modified_base (8)..(8): 2'-fluoro-nucleotide
  modified_base (9)..(9): 2'-OMe-nucleotide
  modified_base (10)..(10): 2'-fluoro-nucleotide
  modified_base (11)..(11): 2'-OMe-nucleotide
  modified_base (12)..(12): 2'-fluoro-nucleotide
  modified_base (13)..(13): 2'-OMe-nucleotide
  modified_base (14)..(14): 2'-fluoro-nucleotide
  modified_base (15)..(15): 2'-OMe-nucleotide
  modified_base (16)..(16): 2'-fluoro-nucleotide
  modified_base (17)..(17): 2'-OMe-nucleotide
  modified_base (18)..(18): 2'-fluoro-nucleotide
  modified_base (19)..(19): 2'-OMe-nucleotide
  modified_base (20)..(20): dT
  modified_base (21)..(21): dT
cugcucagucggugcuugutt

SEQ ID NO: 984 - DNA, 21 bp, Artificial Sequence
  source: /note="Description of Artificial Sequence: Synthetic oligonucleotide"
  source: /note="Description of Combined DNA/RNA Molecule: Synthetic oligonucleotide"
  modified_base (1)..(1): 2'-fluoro-nucleotide
  modified_base (2)..(2): 2'-fluoro-nucleotide
  modified_base (3)..(3): 2'-OMe-nucleotide
  modified_base (4)..(4): 2'-fluoro-nucleotide
  modified_base (5)..(5): 2'-OMe-nucleotide
  modified_base (6)..(6): 2'-fluoro-nucleotide
  modified_base (7)..(7): 2'-OMe-nucleotide
  modified_base (8)..(8): 2'-fluoro-nucleotide
  modified_base (9)..(9): 2'-OMe-nucleotide
  modified_base (10)..(10): 2'-fluoro-nucleotide
  modified_base (11)..(11): 2'-OMe-nucleotide
  modified_base (12)..(12): 2'-fluoro-nucleotide
  modified_base (13)..(13): 2'-OMe-nucleotide
  modified_base (14)..(14): 2'-fluoro-nucleotide
  modified_base (15)..(15): 2'-OMe-nucleotide
  modified_base (16)..(16): 2'-fluoro-nucleotide
  modified_base (17)..(17): 2'-OMe-nucleotide
  modified_base (18)..(18): 2'-fluoro-nucleotide
  modified_base (19)..(19): 2'-OMe-nucleotide
  modified_base (20)..(20): dT
  modified_base (21)..(21): dT
cucugcucagucggugcuutt

SEQ ID NO: 985 - DNA, 21 bp, Artificial Sequence
  source: /note="Description of Artificial Sequence: Synthetic oligonucleotide"
  source: /note="Description of Combined DNA/RNA Molecule: Synthetic oligonucleotide"
  modified_base (1)..(1): 2'-fluoro-nucleotide
  modified_base (2)..(2): 2'-fluoro-nucleotide
  modified_base (3)..(3): 2'-OMe-nucleotide
  modified_base (4)..(4): 2'-fluoro-nucleotide
  modified_base (5)..(5): 2'-OMe-nucleotide
  modified_base (6)..(6): 2'-fluoro-nucleotide
  modified_base (7)..(7): 2'-OMe-nucleotide
  modified_base (8)..(8): 2'-fluoro-nucleotide
  modified_base (9)..(9): 2'-OMe-nucleotide
  modified_base (10)..(10): 2'-fluoro-nucleotide
  modified_base (11)..(11): 2'-OMe-nucleotide
  modified_base (12)..(12): 2'-fluoro-nucleotide
  modified_base (13)..(13): 2'-OMe-nucleotide
  modified_base (14)..(14): 2'-fluoro-nucleotide
  modified_base (15)..(15): 2'-OMe-nucleotide
  modified_base (16)..(16): 2'-fluoro-nucleotide
  modified_base (17)..(17): 2'-OMe-nucleotide
  modified_base (18)..(18): 2'-fluoro-nucleotide
  modified_base (19)..(19): 2'-OMe-nucleotide
  modified_base (20)..(20): dT
  modified_base (21)..(21): dT
aacucuguccauuaccgugtt

SEQ ID NO: 986 - DNA, 21 bp, Artificial Sequence
  source: /note="Description of Artificial Sequence: Synthetic oligonucleotide"
  source: /note="Description of Combined DNA/RNA Molecule: Synthetic oligonucleotide"
  modified_base (1)..(1): 2'-fluoro-nucleotide
  modified_base (2)..(2): 2'-fluoro-nucleotide
  modified_base (3)..(3): 2'-OMe-nucleotide
  modified_base (4)..(4): 2'-fluoro-nucleotide
  modified_base (5)..(5): 2'-OMe-nucleotide
  modified_base (6)..(6): 2'-fluoro-nucleotide
  modified_base (7)..(7): 2'-OMe-nucleotide
  modified_base (8)..(8): 2'-fluoro-nucleotide
  modified_base (9)..(9): 2'-OMe-nucleotide
  modified_base (10)..(10): 2'-fluoro-nucleotide
  modified_base (11)..(11): 2'-OMe-nucleotide
  modified_base (12)..(12): 2'-fluoro-nucleotide
  modified_base (13)..(13): 2'-OMe-nucleotide
  modified_base (14)..(14): 2'-fluoro-nucleotide
  modified_base (15)..(15): 2'-OMe-nucleotide
  modified_base (16)..(16): 2'-fluoro-nucleotide
  modified_base (17)..(17): 2'-OMe-nucleotide
  modified_base (18)..(18): 2'-fluoro-nucleotide
  modified_base (19)..(19): 2'-OMe-nucleotide
  modified_base (20)..(20): dT
  modified_base (21)..(21): dT
uaacucuguccauuaccgutt

SEQ ID NO: 987 - DNA, 21 bp, Artificial Sequence
  source: /note="Description of Artificial Sequence: Synthetic oligonucleotide"
  source: /note="Description of Combined DNA/RNA Molecule: Synthetic oligonucleotide"
  modified_base (1)..(1): 2'-fluoro-nucleotide
  modified_base (2)..(2): 2'-fluoro-nucleotide
  modified_base (3)..(3): 2'-OMe-nucleotide
  modified_base (4)..(4): 2'-fluoro-nucleotide
  modified_base (5)..(5): 2'-OMe-nucleotide
  modified_base (6)..(6): 2'-fluoro-nucleotide
  modified_base (7)..(7): 2'-OMe-nucleotide
  modified_base (8)..(8): 2'-fluoro-nucleotide
  modified_base (9)..(9): 2'-OMe-nucleotide
  modified_base (10)..(10): 2'-fluoro-nucleotide
  modified_base (11)..(11): 2'-OMe-nucleotide
  modified_base (12)..(12): 2'-fluoro-nucleotide
  modified_base (13)..(13): 2'-OMe-nucleotide
  modified_base (14)..(14): 2'-fluoro-nucleotide
  modified_base (15)..(15): 2'-OMe-nucleotide
  modified_base (16)..(16): 2'-fluoro-nucleotide
  modified_base (17)..(17): 2'-OMe-nucleotide
  modified_base (18)..(18): 2'-fluoro-nucleotide
  modified_base (19)..(19): 2'-OMe-nucleotide
  modified_base (20)..(20): dT
  modified_base (21)..(21): dT
auaacucuguccauuaccgtt

SEQ ID NO: 988 - DNA, 21 bp, Artificial Sequence
  source: /note="Description of Artificial Sequence: Synthetic oligonucleotide"
  source: /note="Description of Combined DNA/RNA Molecule: Synthetic oligonucleotide"
  modified_base (1)..(1): 2'-fluoro-nucleotide
  modified_base (2)..(2): 2'-fluoro-nucleotide
  modified_base (3)..(3): 2'-OMe-nucleotide
  modified_base (4)..(4): 2'-fluoro-nucleotide
  modified_base (5)..(5): 2'-OMe-nucleotide
  modified_base (6)..(6): 2'-fluoro-nucleotide
  modified_base (7)..(7): 2'-OMe-nucleotide
  modified_base (8)..(8): 2'-fluoro-nucleotide
  modified_base (9)..(9): 2'-OMe-nucleotide
  modified_base (10)..(10): 2'-fluoro-nucleotide
  modified_base (11)..(11): 2'-OMe-nucleotide
  modified_base (12)..(12): 2'-fluoro-nucleotide
  modified_base (13)..(13): 2'-OMe-nucleotide
  modified_base (14)..(14): 2'-fluoro-nucleotide
  modified_base (15)..(15): 2'-OMe-nucleotide
  modified_base (16)..(16): 2'-fluoro-nucleotide
  modified_base (17)..(17): 2'-OMe-nucleotide
  modified_base (18)..(18): 2'-fluoro-nucleotide
  modified_base (19)..(19): 2'-OMe-nucleotide
  modified_base (20)..(20): dT
  modified_base (21)..(21): dT
aggcuuggaaucgggguaatt

SEQ ID NO: 989 - DNA, 21 bp, Artificial Sequence
  source: /note="Description of Artificial Sequence: Synthetic oligonucleotide"
  source: /note="Description of Combined DNA/RNA Molecule: Synthetic oligonucleotide"
  modified_base (1)..(1): 2'-fluoro-nucleotide
  modified_base (2)..(2): 2'-fluoro-nucleotide
  modified_base (3)..(3): 2'-OMe-nucleotide
  modified_base (4)..(4): 2'-fluoro-nucleotide
  modified_base (5)..(5): 2'-OMe-nucleotide
  modified_base (6)..(6): 2'-fluoro-nucleotide
  modified_base (7)..(7): 2'-OMe-nucleotide
  modified_base (8)..(8): 2'-fluoro-nucleotide
  modified_base (9)..(9): 2'-OMe-nucleotide
  modified_base (10)..(10): 2'-fluoro-nucleotide
  modified_base (11)..(11): 2'-OMe-nucleotide
  modified_base (12)..(12): 2'-fluoro-nucleotide
  modified_base (13)..(13): 2'-OMe-nucleotide
  modified_base (14)..(14): 2'-fluoro-nucleotide
  modified_base (15)..(15): 2'-OMe-nucleotide
  modified_base (16)..(16): 2'-fluoro-nucleotide
  modified_base (17)..(17): 2'-OMe-nucleotide
  modified_base (18)..(18): 2'-fluoro-nucleotide
  modified_base (19)..(19): 2'-OMe-nucleotide
  modified_base (20)..(20): dT
  modified_base (21)..(21): dT
uaggcuuggaaucgggguatt

SEQ ID NO: 990 - DNA, 21 bp, Artificial Sequence
  source: /note="Description of Artificial Sequence: Synthetic oligonucleotide"
  source: /note="Description of Combined DNA/RNA Molecule: Synthetic oligonucleotide"
  modified_base (1)..(1): 2'-fluoro-nucleotide
  modified_base (2)..(2): 2'-fluoro-nucleotide
  modified_base (3)..(3): 2'-OMe-nucleotide
  modified_base (4)..(4): 2'-fluoro-nucleotide
  modified_base (5)..(5): 2'-OMe-nucleotide
  modified_base (6)..(6): 2'-fluoro-nucleotide
  modified_base (7)..(7): 2'-OMe-nucleotide
  modified_base (8)..(8): 2'-fluoro-nucleotide
  modified_base (9)..(9): 2'-OMe-nucleotide
  modified_base (10)..(10): 2'-fluoro-nucleotide
  modified_base (11)..(11): 2'-OMe-nucleotide
  modified_base (12)..(12): 2'-fluoro-nucleotide
  modified_base (13)..(13): 2'-OMe-nucleotide
  modified_base (14)..(14): 2'-fluoro-nucleotide
  modified_base (15)..(15): 2'-OMe-nucleotide
  modified_base (16)..(16): 2'-fluoro-nucleotide
  modified_base (17)..(17): 2'-OMe-nucleotide
  modified_base (18)..(18): 2'-fluoro-nucleotide
  modified_base (19)..(19): 2'-OMe-nucleotide
  modified_base (20)..(20): dT
  modified_base (21)..(21): dT
cuaggcuuggaaucggggutt

SEQ ID NO: 991 - DNA, 21 bp, Artificial Sequence
  source: /note="Description of Artificial Sequence: Synthetic oligonucleotide"
  source: /note="Description of Combined DNA/RNA Molecule: Synthetic oligonucleotide"
  modified_base (1)..(1): 2'-fluoro-nucleotide
  modified_base (2)..(2): 2'-fluoro-nucleotide
  modified_base (3)..(3): 2'-OMe-nucleotide
  modified_base (4)..(4): 2'-fluoro-nucleotide
  modified_base (5)..(5): 2'-OMe-nucleotide
  modified_base (6)..(6): 2'-fluoro-nucleotide
  modified_base (7)..(7): 2'-OMe-nucleotide
  modified_base (8)..(8): 2'-fluoro-nucleotide
  modified_base (9)..(9): 2'-OMe-nucleotide
  modified_base (10)..(10): 2'-fluoro-nucleotide
  modified_base (11)..(11): 2'-OMe-nucleotide
  modified_base (12)..(12): 2'-fluoro-nucleotide
  modified_base (13)..(13): 2'-OMe-nucleotide
  modified_base (14)..(14): 2'-fluoro-nucleotide
  modified_base (15)..(15): 2'-OMe-nucleotide
  modified_base (16)..(16): 2'-fluoro-nucleotide
  modified_base (17)..(17): 2'-OMe-nucleotide
  modified_base (18)..(18): 2'-fluoro-nucleotide
  modified_base (19)..(19): 2'-OMe-nucleotide
  modified_base (20)..(20): dT
  modified_base (21)..(21): dT
ucuaggcuuggaaucggggtt

SEQ ID NO: 992 - DNA, 21 bp, Artificial Sequence
  source: /note="Description of Artificial Sequence: Synthetic oligonucleotide"
  source: /note="Description of Combined DNA/RNA Molecule: Synthetic oligonucleotide"
  modified_base (1)..(1): 2'-fluoro-nucleotide
  modified_base (2)..(2): 2'-fluoro-nucleotide
  modified_base (3)..(3): 2'-OMe-nucleotide
  modified_base (4)..(4): 2'-fluoro-nucleotide
  modified_base (5)..(5): 2'-OMe-nucleotide
  modified_base (6)..(6): 2'-fluoro-nucleotide
  modified_base (7)..(7): 2'-OMe-nucleotide
  modified_base (8)..(8): 2'-fluoro-nucleotide
  modified_base (9)..(9): 2'-OMe-nucleotide
  modified_base (10)..(10): 2'-fluoro-nucleotide
  modified_base (11)..(11): 2'-OMe-nucleotide
  modified_base (12)..(12): 2'-fluoro-nucleotide
  modified_base (13)..(13): 2'-OMe-nucleotide
  modified_base (14)..(14): 2'-fluoro-nucleotide
  modified_base (15)..(15): 2'-OMe-nucleotide
  modified_base (16)..(16): 2'-fluoro-nucleotide
  modified_base (17)..(17): 2'-OMe-nucleotide
  modified_base (18)..(18): 2'-fluoro-nucleotide
  modified_base (19)..(19): 2'-OMe-nucleotide
  modified_base (20)..(20): dT
  modified_base (21)..(21): dT
cucuaggcuuggaaucgggtt

SEQ ID NO: 993 - DNA, 21 bp, Artificial Sequence
  source: /note="Description of Artificial Sequence: Synthetic oligonucleotide"
  source: /note="Description of Combined DNA/RNA Molecule: Synthetic oligonucleotide"
  modified_base (1)..(1): 2'-fluoro-nucleotide
  modified_base (2)..(2): 2'-fluoro-nucleotide
  modified_base (3)..(3): 2'-OMe-nucleotide
  modified_base (4)..(4): 2'-fluoro-nucleotide
  modified_base (5)..(5): 2'-OMe-nucleotide
  modified_base (6)..(6): 2'-fluoro-nucleotide
  modified_base (7)..(7): 2'-OMe-nucleotide
  modified_base (8)..(8): 2'-fluoro-nucleotide
  modified_base (9)..(9): 2'-OMe-nucleotide
  modified_base (10)..(10): 2'-fluoro-nucleotide
  modified_base (11)..(11): 2'-OMe-nucleotide
  modified_base (12)..(12): 2'-fluoro-nucleotide
  modified_base (13)..(13): 2'-OMe-nucleotide
  modified_base (14)..(14): 2'-fluoro-nucleotide
  modified_base (15)..(15): 2'-OMe-nucleotide
  modified_base (16)..(16): 2'-fluoro-nucleotide
  modified_base (17)..(17): 2'-OMe-nucleotide
  modified_base (18)..(18): 2'-fluoro-nucleotide
  modified_base (19)..(19): 2'-OMe-nucleotide
  modified_base (20)..(20): dT
  modified_base (21)..(21): dT
ccucuaggcuuggaaucggtt

SEQ ID NO: 994 - DNA, 21 bp, Artificial Sequence
  source: /note="Description of Artificial Sequence: Synthetic oligonucleotide"
  source: /note="Description of Combined DNA/RNA Molecule: Synthetic oligonucleotide"
  modified_base (1)..(1): 2'-fluoro-nucleotide
  modified_base (2)..(2): 2'-fluoro-nucleotide
  modified_base (3)..(3): 2'-OMe-nucleotide
  modified_base (4)..(4): 2'-fluoro-nucleotide
  modified_base (5)..(5): 2'-OMe-nucleotide
  modified_base (6)..(6): 2'-fluoro-nucleotide
  modified_base (7)..(7): 2'-OMe-nucleotide
  modified_base (8)..(8): 2'-fluoro-nucleotide
  modified_base (9)..(9): 2'-OMe-nucleotide
  modified_base (10)..(10): 2'-fluoro-nucleotide
  modified_base (11)..(11): 2'-OMe-nucleotide
  modified_base (12)..(12): 2'-fluoro-nucleotide
  modified_base (13)..(13): 2'-OMe-nucleotide
  modified_base (14)..(14): 2'-fluoro-nucleotide
  modified_base (15)..(15): 2'-OMe-nucleotide
  modified_base (16)..(16): 2'-fluoro-nucleotide
  modified_base (17)..(17): 2'-OMe-nucleotide
  modified_base (18)..(18): 2'-fluoro-nucleotide
  modified_base (19)..(19): 2'-OMe-nucleotide
  modified_base (20)..(20): dT
  modified_base (21)..(21): dT
gccucuaggcuuggaaucgtt

SEQ ID NO: 995 - DNA, 21 bp, Artificial Sequence
  source: /note="Description of Artificial Sequence: Synthetic oligonucleotide"
  source: /note="Description of Combined DNA/RNA Molecule: Synthetic oligonucleotide"
  modified_base (1)..(1): 2'-fluoro-nucleotide
  modified_base (2)..(2): 2'-fluoro-nucleotide
  modified_base (3)..(3): 2'-OMe-nucleotide
  modified_base (4)..(4): 2'-fluoro-nucleotide
  modified_base (5)..(5): 2'-OMe-nucleotide
  modified_base (6)..(6): 2'-fluoro-nucleotide
  modified_base (7)..(7): 2'-OMe-nucleotide
  modified_base (8)..(8): 2'-fluoro-nucleotide
  modified_base (9)..(9): 2'-OMe-nucleotide
  modified_base (10)..(10): 2'-fluoro-nucleotide
  modified_base (11)..(11): 2'-OMe-nucleotide
  modified_base (12)..(12): 2'-fluoro-nucleotide
  modified_base (13)..(13): 2'-OMe-nucleotide
  modified_base (14)..(14): 2'-fluoro-nucleotide
  modified_base (15)..(15): 2'-OMe-nucleotide
  modified_base (16)..(16): 2'-fluoro-nucleotide
  modified_base (17)..(17): 2'-OMe-nucleotide
  modified_base (18)..(18): 2'-fluoro-nucleotide
  modified_base (19)..(19): 2'-OMe-nucleotide
  modified_base (20)..(20): dT
  modified_base (21)..(21): dT
agccucuaggcuuggaauctt

SEQ ID NO: 996 - DNA, 21 bp, Artificial Sequence
  source: /note="Description of Artificial Sequence: Synthetic oligonucleotide"
  source: /note="Description of Combined DNA/RNA Molecule: Synthetic oligonucleotide"
  modified_base (1)..(1): 2'-fluoro-nucleotide
  modified_base (2)..(2): 2'-fluoro-nucleotide
  modified_base (3)..(3): 2'-OMe-nucleotide
  modified_base (4)..(4): 2'-fluoro-nucleotide
  modified_base (5)..(5): 2'-OMe-nucleotide
  modified_base (6)..(6): 2'-fluoro-nucleotide
  modified_base (7)..(7): 2'-OMe-nucleotide
  modified_base (8)..(8): 2'-fluoro-nucleotide
  modified_base (9)..(9): 2'-OMe-nucleotide
  modified_base (10)..(10): 2'-fluoro-nucleotide
  modified_base (11)..(11): 2'-OMe-nucleotide
  modified_base (12)..(12): 2'-fluoro-nucleotide
  modified_base (13)..(13): 2'-OMe-nucleotide
  modified_base (14)..(14): 2'-fluoro-nucleotide
  modified_base (15)..(15): 2'-OMe-nucleotide
  modified_base (16)..(16): 2'-fluoro-nucleotide
  modified_base (17)..(17): 2'-OMe-nucleotide
  modified_base (18)..(18): 2'-fluoro-nucleotide
  modified_base (19)..(19): 2'-OMe-nucleotide
  modified_base (20)..(20): dT
  modified_base (21)..(21): dT
aggccuuugcucaguuggutt

SEQ ID NO: 997 - DNA, 21 bp, Artificial Sequence
  source: /note="Description of Artificial Sequence: Synthetic oligonucleotide"
  source: /note="Description of Combined DNA/RNA Molecule: Synthetic oligonucleotide"
  modified_base (1)..(1): 2'-fluoro-nucleotide
  modified_base (2)..(2): 2'-fluoro-nucleotide
  modified_base (3)..(3): 2'-OMe-nucleotide
  modified_base (4)..(4): 2'-fluoro-nucleotide
  modified_base (5)..(5): 2'-OMe-nucleotide
  modified_base (6)..(6): 2'-fluoro-nucleotide
  modified_base (7)..(7): 2'-OMe-nucleotide
  modified_base (8)..(8): 2'-fluoro-nucleotide
  modified_base (9)..(9): 2'-OMe-nucleotide
  modified_base (10)..(10): 2'-fluoro-nucleotide
  modified_base (11)..(11): 2'-OMe-nucleotide
  modified_base (12)..(12): 2'-fluoro-nucleotide
  modified_base (13)..(13): 2'-OMe-nucleotide
  modified_base (14)..(14): 2'-fluoro-nucleotide
  modified_base (15)..(15): 2'-OMe-nucleotide
  modified_base (16)..(16): 2'-fluoro-nucleotide
  modified_base (17)..(17): 2'-OMe-nucleotide
  modified_base (18)..(18): 2'-fluoro-nucleotide
  modified_base (19)..(19): 2'-OMe-nucleotide
  modified_base (20)..(20): dT
  modified_base (21)..(21): dT
ucuguccauuuccgugguatt

SEQ ID NO: 998 - DNA, 21 bp, Artificial Sequence
  source: /note="Description of Artificial Sequence: Synthetic oligonucleotide"
  source: /note="Description of Combined DNA/RNA Molecule: Synthetic oligonucleotide"
  modified_base (1)..(1): 2'-fluoro-nucleotide
  modified_base (2)..(2): 2'-fluoro-nucleotide
  modified_base (3)..(3): 2'-OMe-nucleotide
  modified_base (4)..(4): 2'-fluoro-nucleotide
  modified_base (5)..(5): 2'-OMe-nucleotide
  modified_base (6)..(6): 2'-fluoro-nucleotide
  modified_base (7)..(7): 2'-OMe-nucleotide
  modified_base (8)..(8): 2'-fluoro-nucleotide
  modified_base (9)..(9): 2'-OMe-nucleotide
  modified_base (10)..(10): 2'-fluoro-nucleotide
  modified_base (11)..(11): 2'-OMe-nucleotide
  modified_base (12)..(12): 2'-fluoro-nucleotide
  modified_base (13)..(13): 2'-OMe-nucleotide
  modified_base (14)..(14): 2'-fluoro-nucleotide
  modified_base (15)..(15): 2'-OMe-nucleotide
  modified_base (16)..(16): 2'-fluoro-nucleotide
  modified_base (17)..(17): 2'-OMe-nucleotide
  modified_base (18)..(18): 2'-fluoro-nucleotide
  modified_base (19)..(19): 2'-OMe-nucleotide
  modified_base (20)..(20): dT
  modified_base (21)..(21): dT
cucuguccauuuccguggutt

SEQ ID NO: 999 - DNA, 21 bp, Artificial Sequence
  source: /note="Description of Artificial Sequence: Synthetic oligonucleotide"
  source: /note="Description of Combined DNA/RNA Molecule: Synthetic oligonucleotide"
  modified_base (1)..(1): 2'-fluoro-nucleotide
  modified_base (2)..(2): 2'-fluoro-nucleotide
  modified_base (3)..(3): 2'-OMe-nucleotide
  modified_base (4)..(4): 2'-fluoro-nucleotide
  modified_base (5)..(5): 2'-OMe-nucleotide
  modified_base (6)..(6): 2'-fluoro-nucleotide
  modified_base (7)..(7): 2'-OMe-nucleotide
  modified_base (8)..(8): 2'-fluoro-nucleotide
  modified_base (9)..(9): 2'-OMe-nucleotide
  modified_base (10)..(10): 2'-fluoro-nucleotide
  modified_base (11)..(11): 2'-OMe-nucleotide
  modified_base (12)..(12): 2'-fluoro-nucleotide
  modified_base (13)..(13): 2'-OMe-nucleotide
  modified_base (14)..(14): 2'-fluoro-nucleotide
  modified_base (15)..(15): 2'-OMe-nucleotide
  modified_base (16)..(16): 2'-fluoro-nucleotide
  modified_base (17)..(17): 2'-OMe-nucleotide
  modified_base (18)..(18): 2'-fluoro-nucleotide
  modified_base (19)..(19): 2'-OMe-nucleotide
  modified_base (20)..(20): dT
  modified_base (21)..(21): dT
aacucuguccauuuccgugtt

SEQ ID NO: 1000 - DNA, 21 bp, Artificial Sequence
  source: /note="Description of Artificial Sequence: Synthetic oligonucleotide"
  source: /note="Description of Combined DNA/RNA Molecule: Synthetic oligonucleotide"
  modified_base (1)..(1): 2'-fluoro-nucleotide
  modified_base (2)..(2): 2'-fluoro-nucleotide
  modified_base (3)..(3): 2'-OMe-nucleotide
  modified_base (4)..(4): 2'-fluoro-nucleotide
  modified_base (5)..(5): 2'-OMe-nucleotide
  modified_base (6)..(6): 2'-fluoro-nucleotide
  modified_base (7)..(7): 2'-OMe-nucleotide
  modified_base (8)..(8): 2'-fluoro-nucleotide
  modified_base (9)..(9): 2'-OMe-nucleotide
  modified_base (10)..(10): 2'-fluoro-nucleotide
  modified_base (11)..(11): 2'-OMe-nucleotide
  modified_base (12)..(12): 2'-fluoro-nucleotide
  modified_base (13)..(13): 2'-OMe-nucleotide
  modified_base (14)..(14): 2'-fluoro-nucleotide
  modified_base (15)..(15): 2'-OMe-nucleotide
  modified_base (16)..(16): 2'-fluoro-nucleotide
  modified_base (17)..(17): 2'-OMe-nucleotide
  modified_base (18)..(18): 2'-fluoro-nucleotide
  modified_base (19)..(19): 2'-OMe-nucleotide
  modified_base (20)..(20): dT
  modified_base (21)..(21): dT
uaacucuguccauuuccgutt

SEQ ID NO: 1001 - DNA, 21 bp, Artificial Sequence
  source: /note="Description of Artificial Sequence: Synthetic oligonucleotide"
  source: /note="Description of Combined DNA/RNA Molecule: Synthetic oligonucleotide"
  modified_base (1)..(1): 2'-fluoro-nucleotide
  modified_base (2)..(2): 2'-fluoro-nucleotide
  modified_base (3)..(3): 2'-OMe-nucleotide
  modified_base (4)..(4): 2'-fluoro-nucleotide
  modified_base (5)..(5): 2'-OMe-nucleotide
  modified_base (6)..(6): 2'-fluoro-nucleotide
  modified_base (7)..(7): 2'-OMe-nucleotide
  modified_base (8)..(8): 2'-fluoro-nucleotide
  modified_base (9)..(9): 2'-OMe-nucleotide
  modified_base (10)..(10): 2'-fluoro-nucleotide
  modified_base (11)..(11): 2'-OMe-nucleotide
  modified_base (12)..(12): 2'-fluoro-nucleotide
  modified_base (13)..(13): 2'-OMe-nucleotide
  modified_base (14)..(14): 2'-fluoro-nucleotide
  modified_base (15)..(15): 2'-OMe-nucleotide
  modified_base (16)..(16): 2'-fluoro-nucleotide
  modified_base (17)..(17): 2'-OMe-nucleotide
  modified_base (18)..(18): 2'-fluoro-nucleotide
  modified_base (19)..(19): 2'-OMe-nucleotide
  modified_base (20)..(20): dT
  modified_base (21)..(21): dT
auaacucuguccauuuccgtt

SEQ ID NO: 1002 - DNA, 21 bp, Artificial Sequence
  source: /note="Description of Artificial Sequence: Synthetic oligonucleotide"
  source: /note="Description of Combined DNA/RNA Molecule: Synthetic oligonucleotide"
  modified_base (1)..(1): 2'-fluoro-nucleotide
  modified_base (2)..(2): 2'-fluoro-nucleotide
  modified_base (3)..(3): 2'-OMe-nucleotide
  modified_base (4)..(4): 2'-fluoro-nucleotide
  modified_base (5)..(5): 2'-OMe-nucleotide
  modified_base (6)..(6): 2'-fluoro-nucleotide
  modified_base (7)..(7): 2'-OMe-nucleotide
  modified_base (8)..(8): 2'-fluoro-nucleotide
  modified_base (9)..(9): 2'-OMe-nucleotide
  modified_base (10)..(10): 2'-fluoro-nucleotide
  modified_base (11)..(11): 2'-OMe-nucleotide
  modified_base (12)..(12): 2'-fluoro-nucleotide
  modified_base (13)..(13): 2'-OMe-nucleotide
  modified_base (14)..(14): 2'-fluoro-nucleotide
  modified_base (15)..(15): 2'-OMe-nucleotide
  modified_base (16)..(16): 2'-fluoro-nucleotide
  modified_base (17)..(17): 2'-OMe-nucleotide
  modified_base (18)..(18): 2'-fluoro-nucleotide
  modified_base (19)..(19): 2'-OMe-nucleotide
  modified_base (20)..(20): dT
  modified_base (21)..(21): dT
cuugauaacucuguccauutt

SEQ ID NO: 1003 - DNA, 21 bp, Artificial Sequence
  source: /note="Description of Artificial Sequence: Synthetic oligonucleotide"
  source: /note="Description of Combined DNA/RNA Molecule: Synthetic oligonucleotide"
  modified_base (1)..(1): 2'-fluoro-nucleotide
  modified_base (2)..(2): 2'-fluoro-nucleotide
  modified_base (3)..(3): 2'-OMe-nucleotide
  modified_base (4)..(4): 2'-fluoro-nucleotide
  modified_base (5)..(5): 2'-OMe-nucleotide
  modified_base (6)..(6): 2'-fluoro-nucleotide
  modified_base (7)..(7): 2'-OMe-nucleotide
  modified_base (8)..(8): 2'-fluoro-nucleotide
  modified_base (9)..(9): 2'-OMe-nucleotide
  modified_base (10)..(10): 2'-fluoro-nucleotide
  modified_base (11)..(11): 2'-OMe-nucleotide
  modified_base (12)..(12): 2'-fluoro-nucleotide
  modified_base (13)..(13): 2'-OMe-nucleotide
  modified_base (14)..(14): 2'-fluoro-nucleotide
  modified_base (15)..(15): 2'-OMe-nucleotide
  modified_base (16)..(16): 2'-fluoro-nucleotide
  modified_base (17)..(17): 2'-OMe-nucleotide
  modified_base (18)..(18): 2'-fluoro-nucleotide
  modified_base (19)..(19): 2'-OMe-nucleotide
  modified_base (20)..(20): dT
  modified_base (21)..(21): dT
ccuugauaacucuguccautt

SEQ ID NO: 1004 - DNA, 21 bp, Artificial Sequence
  source: /note="Description of Artificial Sequence: Synthetic oligonucleotide"
  source: /note="Description of Combined DNA/RNA Molecule: Synthetic oligonucleotide"
  modified_base (1)..(1): 2'-fluoro-nucleotide
  modified_base (2)..(2): 2'-fluoro-nucleotide
  modified_base (3)..(3): 2'-OMe-nucleotide
  modified_base (4)..(4): 2'-fluoro-nucleotide
  modified_base (5)..(5): 2'-OMe-nucleotide
  modified_base (6)..(6): 2'-fluoro-nucleotide
  modified_base (7)..(7): 2'-OMe-nucleotide
  modified_base (8)..(8): 2'-fluoro-nucleotide
  modified_base (9)..(9): 2'-OMe-nucleotide
  modified_base (10)..(10): 2'-fluoro-nucleotide
  modified_base (11)..(11): 2'-OMe-nucleotide
  modified_base (12)..(12): 2'-fluoro-nucleotide
  modified_base (13)..(13): 2'-OMe-nucleotide
  modified_base (14)..(14): 2'-fluoro-nucleotide
  modified_base (15)..(15): 2'-OMe-nucleotide
  modified_base (16)..(16): 2'-fluoro-nucleotide
  modified_base (17)..(17): 2'-OMe-nucleotide
  modified_base (18)..(18): 2'-fluoro-nucleotide
  modified_base (19)..(19): 2'-OMe-nucleotide
  modified_base (20)..(20): dT
  modified_base (21)..(21): dT
ugccuugauaacucugucctt

SEQ ID NO: 1005 - DNA, 21 bp, Artificial Sequence
  source: /note="Description of Artificial Sequence: Synthetic oligonucleotide"
  source: /note="Description of Combined DNA/RNA Molecule: Synthetic oligonucleotide"
  modified_base (1)..(1): 2'-fluoro-nucleotide
  modified_base (2)..(2): 2'-fluoro-nucleotide
  modified_base (3)..(3): 2'-OMe-nucleotide
  modified_base (4)..(4): 2'-fluoro-nucleotide
  modified_base (5)..(5): 2'-OMe-nucleotide
  modified_base (6)..(6): 2'-fluoro-nucleotide
  modified_base (7)..(7): 2'-OMe-nucleotide
  modified_base (8)..(8): 2'-fluoro-nucleotide
  modified_base (9)..(9): 2'-OMe-nucleotide
  modified_base (10)..(10): 2'-fluoro-nucleotide
  modified_base (11)..(11): 2'-OMe-nucleotide
  modified_base (12)..(12): 2'-fluoro-nucleotide
  modified_base (13)..(13): 2'-OMe-nucleotide
  modified_base (14)..(14): 2'-fluoro-nucleotide
  modified_base (15)..(15): 2'-OMe-nucleotide
  modified_base (16)..(16): 2'-fluoro-nucleotide
  modified_base (17)..(17): 2'-OMe-nucleotide
  modified_base (18)..(18): 2'-fluoro-nucleotide
  modified_base (19)..(19): 2'-OMe-nucleotide
  modified_base (20)..(20): dT
  modified_base (21)..(21): dT
gugccuugauaacucuguctt

SEQ ID NO: 1006 - DNA, 21 bp, Artificial Sequence
  source: /note="Description of Artificial Sequence: Synthetic oligonucleotide"
  source: /note="Description of Combined DNA/RNA Molecule: Synthetic oligonucleotide"
  modified_base (1)..(1): 2'-fluoro-nucleotide
  modified_base (2)..(2): 2'-fluoro-nucleotide
  modified_base (3)..(3): 2'-OMe-nucleotide
  modified_base (4)..(4): 2'-fluoro-nucleotide
  modified_base (5)..(5): 2'-OMe-nucleotide
  modified_base (6)..(6): 2'-fluoro-nucleotide
  modified_base (7)..(7): 2'-OMe-nucleotide
  modified_base (8)..(8): 2'-fluoro-nucleotide
  modified_base (9)..(9): 2'-OMe-nucleotide
  modified_base (10)..(10): 2'-fluoro-nucleotide
  modified_base (11)..(11): 2'-OMe-nucleotide
  modified_base (12)..(12): 2'-fluoro-nucleotide
  modified_base (13)..(13): 2'-OMe-nucleotide
  modified_base (14)..(14): 2'-fluoro-nucleotide
  modified_base (15)..(15): 2'-OMe-nucleotide
  modified_base (16)..(16): 2'-fluoro-nucleotide
  modified_base (17)..(17): 2'-OMe-nucleotide
  modified_base (18)..(18): 2'-fluoro-nucleotide
  modified_base (19)..(19): 2'-OMe-nucleotide
  modified_base (20)..(20): dT
  modified_base (21)..(21): dT
ugugccuugauaacucugutt

SEQ ID NO: 1007 - DNA, 21 bp, Artificial Sequence
  source: /note="Description of Artificial Sequence: Synthetic oligonucleotide"
  source: /note="Description of Combined DNA/RNA Molecule: Synthetic oligonucleotide"
  modified_base (1)..(1): 2'-fluoro-nucleotide
  modified_base (2)..(2): 2'-fluoro-nucleotide
  modified_base (3)..(3): 2'-OMe-nucleotide
  modified_base (4)..(4): 2'-fluoro-nucleotide
  modified_base (5)..(5): 2'-OMe-nucleotide
  modified_base (6)..(6): 2'-fluoro-nucleotide
  modified_base (7)..(7): 2'-OMe-nucleotide
  modified_base (8)..(8): 2'-fluoro-nucleotide
  modified_base (9)..(9): 2'-OMe-nucleotide
  modified_base (10)..(10): 2'-fluoro-nucleotide
  modified_base (11)..(11): 2'-OMe-nucleotide
  modified_base (12)..(12): 2'-fluoro-nucleotide
  modified_base (13)..(13): 2'-OMe-nucleotide
  modified_base (14)..(14): 2'-fluoro-nucleotide
  modified_base (15)..(15): 2'-OMe-nucleotide
  modified_base (16)..(16): 2'-fluoro-nucleotide
  modified_base (17)..(17): 2'-OMe-nucleotide
  modified_base (18)..(18): 2'-fluoro-nucleotide
  modified_base (19)..(19): 2'-OMe-nucleotide
  modified_base (20)..(20): dT
  modified_base (21)..(21): dT
guaugugccuugauaacuctt

SEQ ID NO: 1008 - DNA, 21 bp, Artificial Sequence
  source: /note="Description of Artificial Sequence: Synthetic oligonucleotide"
  source: /note="Description of Combined DNA/RNA Molecule: Synthetic oligonucleotide"
  modified_base (1)..(1): 2'-fluoro-nucleotide
  modified_base (2)..(2): 2'-fluoro-nucleotide
  modified_base (3)..(3): 2'-OMe-nucleotide
  modified_base (4)..(4): 2'-fluoro-nucleotide
  modified_base (5)..(5): 2'-OMe-nucleotide
  modified_base (6)..(6): 2'-fluoro-nucleotide
  modified_base (7)..(7): 2'-OMe-nucleotide
  modified_base (8)..(8): 2'-fluoro-nucleotide
  modified_base (9)..(9): 2'-OMe-nucleotide
  modified_base (10)..(10): 2'-fluoro-nucleotide
  modified_base (11)..(11): 2'-OMe-nucleotide
  modified_base (12)..(12): 2'-fluoro-nucleotide
  modified_base (13)..(13): 2'-OMe-nucleotide
  modified_base (14)..(14): 2'-fluoro-nucleotide
  modified_base (15)..(15): 2'-OMe-nucleotide
  modified_base (16)..(16): 2'-fluoro-nucleotide
  modified_base (17)..(17): 2'-OMe-nucleotide
  modified_base (18)..(18): 2'-fluoro-nucleotide
  modified_base (19)..(19): 2'-OMe-nucleotide
  modified_base (20)..(20): dT
  modified_base (21)..(21): dT
aguaugugccuugauaacutt

SEQ ID NO: 1009 - DNA, 21 bp, Artificial Sequence
  source: /note="Description of Artificial Sequence: Synthetic oligonucleotide"
  source: /note="Description of Combined DNA/RNA Molecule: Synthetic oligonucleotide"
  modified_base (1)..(1): 2'-fluoro-nucleotide
  modified_base (2)..(2): 2'-fluoro-nucleotide
  modified_base (3)..(3): 2'-OMe-nucleotide
  modified_base (4)..(4): 2'-fluoro-nucleotide
  modified_base (5)..(5): 2'-OMe-nucleotide
  modified_base (6)..(6): 2'-fluoro-nucleotide
  modified_base (7)..(7): 2'-OMe-nucleotide
  modified_base (8)..(8): 2'-fluoro-nucleotide
  modified_base (9)..(9): 2'-OMe-nucleotide
  modified_base (10)..(10): 2'-fluoro-nucleotide
  modified_base (11)..(11): 2'-OMe-nucleotide
  modified_base (12)..(12): 2'-fluoro-nucleotide
  modified_base (13)..(13): 2'-OMe-nucleotide
  modified_base (14)..(14): 2'-fluoro-nucleotide
  modified_base (15)..(15): 2'-OMe-nucleotide
  modified_base (16)..(16): 2'-fluoro-nucleotide
  modified_base (17)..(17): 2'-OMe-nucleotide
  modified_base (18)..(18): 2'-fluoro-nucleotide
  modified_base (19)..(19): 2'-OMe-nucleotide
  modified_base (20)..(20): dT
  modified_base (21)..(21): dT
aaguaugugccuugauaactt

SEQ ID NO: 1010 - DNA, 21 bp, Artificial Sequence
  source: /note="Description of Artificial Sequence: Synthetic oligonucleotide"
  source: /note="Description of Combined DNA/RNA Molecule: Synthetic oligonucleotide"
  modified_base (1)..(1): 2'-fluoro-nucleotide
  modified_base (2)..(2): 2'-fluoro-nucleotide
  modified_base (3)..(3): 2'-OMe-nucleotide
  modified_base (4)..(4): 2'-fluoro-nucleotide
  modified_base (5)..(5): 2'-OMe-nucleotide
  modified_base (6)..(6): 2'-fluoro-nucleotide
  modified_base (7)..(7): 2'-OMe-nucleotide
  modified_base (8)..(8): 2'-fluoro-nucleotide
  modified_base (9)..(9): 2'-OMe-nucleotide
  modified_base (10)..(10): 2'-fluoro-nucleotide
  modified_base (11)..(11): 2'-OMe-nucleotide
  modified_base (12)..(12): 2'-fluoro-nucleotide
  modified_base (13)..(13): 2'-OMe-nucleotide
  modified_base (14)..(14): 2'-fluoro-nucleotide
  modified_base (15)..(15): 2'-OMe-nucleotide
  modified_base (16)..(16): 2'-fluoro-nucleotide
  modified_base (17)..(17): 2'-OMe-nucleotide
  modified_base (18)..(18): 2'-fluoro-nucleotide
  modified_base (19)..(19): 2'-OMe-nucleotide
  modified_base (20)..(20): dT
  modified_base (21)..(21): dT
cuugaucaagccagcauuutt

SEQ ID NO: 1011 - DNA, 21 bp, Artificial Sequence
  source: /note="Description of Artificial Sequence: Synthetic oligonucleotide"
  source: /note="Description of Combined DNA/RNA Molecule: Synthetic oligonucleotide"
  modified_base (1)..(1): 2'-fluoro-nucleotide
  modified_base (2)..(2): 2'-fluoro-nucleotide
  modified_base (3)..(3): 2'-OMe-nucleotide
  modified_base (4)..(4): 2'-fluoro-nucleotide
  modified_base (5)..(5): 2'-OMe-nucleotide
  modified_base (6)..(6): 2'-fluoro-nucleotide
  modified_base (7)..(7): 2'-OMe-nucleotide
  modified_base (8)..(8): 2'-fluoro-nucleotide
  modified_base (9)..(9): 2'-OMe-nucleotide
  modified_base (10)..(10): 2'-fluoro-nucleotide
  modified_base (11)..(11): 2'-OMe-nucleotide
  modified_base (12)..(12): 2'-fluoro-nucleotide
  modified_base (13)..(13): 2'-OMe-nucleotide
  modified_base (14)..(14): 2'-fluoro-nucleotide
  modified_base (15)..(15): 2'-OMe-nucleotide
  modified_base (16)..(16): 2'-fluoro-nucleotide
  modified_base (17)..(17): 2'-OMe-nucleotide
  modified_base (18)..(18): 2'-fluoro-nucleotide
  modified_base (19)..(19): 2'-OMe-nucleotide
  modified_base (20)..(20): dT
  modified_base (21)..(21): dT
caguaguucuugaucaagctt

SEQ ID NO: 1012 - DNA, 21 bp, Artificial Sequence
  source: /note="Description of Artificial Sequence: Synthetic oligonucleotide"
  source: /note="Description of Combined DNA/RNA Molecule: Synthetic oligonucleotide"
  modified_base (1)..(1): 2'-fluoro-nucleotide
  modified_base (2)..(2): 2'-fluoro-nucleotide
  modified_base (3)..(3): 2'-OMe-nucleotide
  modified_base (4)..(4): 2'-fluoro-nucleotide
  modified_base (5)..(5): 2'-OMe-nucleotide
  modified_base (6)..(6): 2'-fluoro-nucleotide
  modified_base (7)..(7): 2'-OMe-nucleotide
  modified_base (8)..(8): 2'-fluoro-nucleotide
  modified_base (9)..(9): 2'-OMe-nucleotide
  modified_base (10)..(10): 2'-fluoro-nucleotide
  modified_base (11)..(11): 2'-OMe-nucleotide
  modified_base (12)..(12): 2'-fluoro-nucleotide
  modified_base (13)..(13): 2'-OMe-nucleotide
  modified_base (14)..(14): 2'-fluoro-nucleotide
  modified_base (15)..(15): 2'-OMe-nucleotide
  modified_base (16)..(16): 2'-fluoro-nucleotide
  modified_base (17)..(17): 2'-OMe-nucleotide
  modified_base (18)..(18): 2'-fluoro-nucleotide
  modified_base (19)..(19): 2'-OMe-nucleotide
  modified_base (20)..(20): dT
  modified_base (21)..(21): dT
uuguauaacaccaaggggctt

SEQ ID NO: 1013 - DNA, 21 bp, Artificial Sequence
  source: /note="Description of Artificial Sequence: Synthetic oligonucleotide"
  source: /note="Description of Combined DNA/RNA Molecule: Synthetic oligonucleotide"
  modified_base (1)..(1): 2'-fluoro-nucleotide
  modified_base (2)..(2): 2'-fluoro-nucleotide
  modified_base (3)..(3): 2'-OMe-nucleotide
  modified_base (4)..(4): 2'-fluoro-nucleotide
  modified_base (5)..(5): 2'-OMe-nucleotide
  modified_base (6)..(6): 2'-fluoro-nucleotide
  modified_base (7)..(7): 2'-OMe-nucleotide
  modified_base (8)..(8): 2'-fluoro-nucleotide
  modified_base (9)..(9): 2'-OMe-nucleotide
  modified_base (10)..(10): 2'-fluoro-nucleotide
  modified_base (11)..(11): 2'-OMe-nucleotide
  modified_base (12)..(12): 2'-fluoro-nucleotide
  modified_base (13)..(13): 2'-OMe-nucleotide
  modified_base (14)..(14): 2'-fluoro-nucleotide
  modified_base (15)..(15): 2'-OMe-nucleotide
  modified_base (16)..(16): 2'-fluoro-nucleotide
  modified_base (17)..(17): 2'-OMe-nucleotide
  modified_base (18)..(18): 2'-fluoro-nucleotide
  modified_base (19)..(19): 2'-OMe-nucleotide
  modified_base (20)..(20): dT
  modified_base (21)..(21): dT
uguuguauaacaccaagggtt

SEQ ID NO: 1014 - DNA, 21 bp, Artificial Sequence
  source: /note="Description of Artificial Sequence: Synthetic oligonucleotide"
  source: /note="Description of Combined DNA/RNA Molecule: Synthetic oligonucleotide"
  modified_base (1)..(1): 2'-fluoro-nucleotide
  modified_base (2)..(2): 2'-fluoro-nucleotide
  modified_base (3)..(3): 2'-OMe-nucleotide
  modified_base (4)..(4): 2'-fluoro-nucleotide
  modified_base (5)..(5): 2'-OMe-nucleotide
  modified_base (6)..(6): 2'-fluoro-nucleotide
  modified_base (7)..(7): 2'-OMe-nucleotide
  modified_base (8)..(8): 2'-fluoro-nucleotide
  modified_base (9)..(9): 2'-OMe-nucleotide
  modified_base (10)..(10): 2'-fluoro-nucleotide
  modified_base (11)..(11): 2'-OMe-nucleotide
  modified_base (12)..(12): 2'-fluoro-nucleotide
  modified_base (13)..(13): 2'-OMe-nucleotide
  modified_base (14)..(14): 2'-fluoro-nucleotide
  modified_base (15)..(15): 2'-OMe-nucleotide
  modified_base (16)..(16): 2'-fluoro-nucleotide
  modified_base (17)..(17): 2'-OMe-nucleotide
  modified_base (18)..(18): 2'-fluoro-nucleotide
  modified_base (19)..(19): 2'-OMe-nucleotide
  modified_base (20)..(20): dT
  modified_base (21)..(21): dT
aucuguuguauaacaccaatt

SEQ ID NO: 1015 - DNA, 21 bp, Artificial Sequence
  source: /note="Description of Artificial Sequence: Synthetic oligonucleotide"
  source: /note="Description of Combined DNA/RNA Molecule: Synthetic oligonucleotide"
  modified_base (1)..(1): 2'-fluoro-nucleotide
  modified_base (2)..(2): 2'-fluoro-nucleotide
  modified_base (3)..(3): 2'-OMe-nucleotide
  modified_base (4)..(4): 2'-fluoro-nucleotide
  modified_base (5)..(5): 2'-OMe-nucleotide
  modified_base (6)..(6): 2'-fluoro-nucleotide
  modified_base (7)..(7): 2'-OMe-nucleotide
  modified_base (8)..(8): 2'-fluoro-nucleotide
  modified_base (9)..(9): 2'-OMe-nucleotide
  modified_base (10)..(10): 2'-fluoro-nucleotide
  modified_base (11)..(11): 2'-OMe-nucleotide
  modified_base (12)..(12): 2'-fluoro-nucleotide
  modified_base (13)..(13): 2'-OMe-nucleotide
  modified_base (14)..(14): 2'-fluoro-nucleotide
  modified_base (15)..(15): 2'-OMe-nucleotide
  modified_base (16)..(16): 2'-fluoro-nucleotide
  modified_base (17)..(17): 2'-OMe-nucleotide
  modified_base (18)..(18): 2'-fluoro-nucleotide
  modified_base (19)..(19): 2'-OMe-nucleotide
  modified_base (20)..(20): dT
  modified_base (21)..(21): dT
gggaucuguuguauaacactt

SEQ ID NO: 1016 - DNA, 21 bp, Artificial Sequence
  source: /note="Description of Artificial Sequence: Synthetic oligonucleotide"
  source: /note="Description of Combined DNA/RNA Molecule: Synthetic oligonucleotide"
  modified_base (1)..(1): 2'-fluoro-nucleotide
  modified_base (2)..(2): 2'-fluoro-nucleotide
  modified_base (3)..(3): 2'-OMe-nucleotide
  modified_base (4)..(4): 2'-fluoro-nucleotide
  modified_base (5)..(5): 2'-OMe-nucleotide
  modified_base (6)..(6): 2'-fluoro-nucleotide
  modified_base (7)..(7): 2'-OMe-nucleotide
  modified_base (8)..(8): 2'-fluoro-nucleotide
  modified_base (9)..(9): 2'-OMe-nucleotide
  modified_base (10)..(10): 2'-fluoro-nucleotide
  modified_base (11)..(11): 2'-OMe-nucleotide
  modified_base (12)..(12): 2'-fluoro-nucleotide
  modified_base (13)..(13): 2'-OMe-nucleotide
  modified_base (14)..(14): 2'-fluoro-nucleotide
  modified_base (15)..(15): 2'-OMe-nucleotide
  modified_base (16)..(16): 2'-fluoro-nucleotide
  modified_base (17)..(17): 2'-OMe-nucleotide
  modified_base (18)..(18): 2'-fluoro-nucleotide
  modified_base (19)..(19): 2'-OMe-nucleotide
  modified_base (20)..(20): dT
  modified_base (21)..(21): dT
cacugggaucuguuguauatt

SEQ ID NO: 1017 - DNA, 21 bp, Artificial Sequence
  source: /note="Description of Artificial Sequence: Synthetic oligonucleotide"
  source: /note="Description of Combined DNA/RNA Molecule: Synthetic oligonucleotide"
  modified_base (1)..(1): 2'-fluoro-nucleotide
  modified_base (2)..(2): 2'-fluoro-nucleotide
  modified_base (3)..(3): 2'-OMe-nucleotide
  modified_base (4)..(4): 2'-fluoro-nucleotide
  modified_base (5)..(5): 2'-OMe-nucleotide
  modified_base (6)..(6): 2'-fluoro-nucleotide
  modified_base (7)..(7): 2'-OMe-nucleotide
  modified_base (8)..(8): 2'-fluoro-nucleotide
  modified_base (9)..(9): 2'-OMe-nucleotide
  modified_base (10)..(10): 2'-fluoro-nucleotide
  modified_base (11)..(11): 2'-OMe-nucleotide
  modified_base (12)..(12): 2'-fluoro-nucleotide
  modified_base (13)..(13): 2'-OMe-nucleotide
  modified_base (14)..(14): 2'-fluoro-nucleotide
  modified_base (15)..(15): 2'-OMe-nucleotide
  modified_base (16)..(16): 2'-fluoro-nucleotide
  modified_base (17)..(17): 2'-OMe-nucleotide
  modified_base (18)..(18): 2'-fluoro-nucleotide
  modified_base (19)..(19): 2'-OMe-nucleotide
  modified_base (20)..(20): dT
  modified_base (21)..(21): dT
ggcauugugucagguugcatt

SEQ ID NO: 1018 - DNA, 21 bp, Artificial Sequence
  source: /note="Description of Artificial Sequence: Synthetic oligonucleotide"
  source: /note="Description of Combined DNA/RNA Molecule: Synthetic oligonucleotide"
  modified_base (1)..(1): 2'-fluoro-nucleotide
  modified_base (2)..(2): 2'-fluoro-nucleotide
  modified_base (3)..(3): 2'-OMe-nucleotide
  modified_base (4)..(4): 2'-fluoro-nucleotide
  modified_base (5)..(5): 2'-OMe-nucleotide
  modified_base (6)..(6): 2'-fluoro-nucleotide
  modified_base (7)..(7): 2'-OMe-nucleotide
  modified_base (8)..(8): 2'-fluoro-nucleotide
  modified_base (9)..(9): 2'-OMe-nucleotide
  modified_base (10)..(10): 2'-fluoro-nucleotide
  modified_base (11)..(11): 2'-OMe-nucleotide
  modified_base (12)..(12): 2'-fluoro-nucleotide
  modified_base (13)..(13): 2'-OMe-nucleotide
  modified_base (14)..(14): 2'-fluoro-nucleotide
  modified_base (15)..(15): 2'-OMe-nucleotide
  modified_base (16)..(16): 2'-fluoro-nucleotide
  modified_base (17)..(17): 2'-OMe-nucleotide
  modified_base (18)..(18): 2'-fluoro-nucleotide
  modified_base (19)..(19): 2'-OMe-nucleotide
  modified_base (20)..(20): dT
  modified_base (21)..(21): dT
aggcauugugucagguugctt

SEQ ID NO: 1019 - DNA, 21 bp, Artificial Sequence
  source: /note="Description of Artificial Sequence: Synthetic oligonucleotide"
  source: /note="Description of Combined DNA/RNA Molecule: Synthetic oligonucleotide"
  modified_base (1)..(1): 2'-fluoro-nucleotide
  modified_base (2)..(2): 2'-fluoro-nucleotide
  modified_base (3)..(3): 2'-OMe-nucleotide
  modified_base (4)..(4): 2'-fluoro-nucleotide
  modified_base (5)..(5): 2'-OMe-nucleotide
  modified_base (6)..(6): 2'-fluoro-nucleotide
  modified_base (7)..(7): 2'-OMe-nucleotide
  modified_base (8)..(8): 2'-fluoro-nucleotide
  modified_base (9)..(9): 2'-OMe-nucleotide
  modified_base (10)..(10): 2'-fluoro-nucleotide
  modified_base (11)..(11): 2'-OMe-nucleotide
  modified_base (12)..(12): 2'-fluoro-nucleotide
  modified_base (13)..(13): 2'-OMe-nucleotide
  modified_base (14)..(14): 2'-fluoro-nucleotide
  modified_base (15)..(15): 2'-OMe-nucleotide
  modified_base (16)..(16): 2'-fluoro-nucleotide
  modified_base (17)..(17): 2'-OMe-nucleotide
  modified_base (18)..(18): 2'-fluoro-nucleotide
  modified_base (19)..(19): 2'-OMe-nucleotide
  modified_base (20)..(20): dT
  modified_base (21)..(21): dT
ugggaccaccgugagaguutt

SEQ ID NO: 1020 - DNA, 21 bp, Artificial Sequence
  source: /note="Description of Artificial Sequence: Synthetic oligonucleotide"
  source: /note="Description of Combined DNA/RNA Molecule: Synthetic oligonucleotide"
  modified_base (1)..(1): 2'-fluoro-nucleotide
  modified_base (2)..(2): 2'-fluoro-nucleotide
  modified_base (3)..(3): 2'-OMe-nucleotide
  modified_base (4)..(4): 2'-fluoro-nucleotide
  modified_base (5)..(5): 2'-OMe-nucleotide
  modified_base (6)..(6): 2'-fluoro-nucleotide
  modified_base (7)..(7): 2'-OMe-nucleotide
  modified_base (8)..(8): 2'-fluoro-nucleotide
  modified_base (9)..(9): 2'-OMe-nucleotide
  modified_base (10)..(10): 2'-fluoro-nucleotide
  modified_base (11)..(11): 2'-OMe-nucleotide
  modified_base (12)..(12): 2'-fluoro-nucleotide
  modified_base (13)..(13): 2'-OMe-nucleotide
  modified_base (14)..(14): 2'-fluoro-nucleotide
  modified_base (15)..(15): 2'-OMe-nucleotide
  modified_base (16)..(16): 2'-fluoro-nucleotide
  modified_base (17)..(17): 2'-OMe-nucleotide
  modified_base (18)..(18): 2'-fluoro-nucleotide
  modified_base (19)..(19): 2'-OMe-nucleotide
  modified_base (20)..(20): dT
  modified_base (21)..(21): dT
aucugggaccaccgugagatt

SEQ ID NO: 1021 - DNA, 21 bp, Artificial Sequence
  source: /note="Description of Artificial Sequence: Synthetic oligonucleotide"
  source: /note="Description of Combined DNA/RNA Molecule: Synthetic oligonucleotide"
  modified_base (1)..(1): 2'-fluoro-nucleotide
  modified_base (2)..(2): 2'-fluoro-nucleotide
  modified_base (3)..(3): 2'-OMe-nucleotide
  modified_base (4)..(4): 2'-fluoro-nucleotide
  modified_base (5)..(5): 2'-OMe-nucleotide
  modified_base (6)..(6): 2'-fluoro-nucleotide
  modified_base (7)..(7): 2'-OMe-nucleotide
  modified_base (8)..(8): 2'-fluoro-nucleotide
  modified_base (9)..(9): 2'-OMe-nucleotide
  modified_base (10)..(10): 2'-fluoro-nucleotide
  modified_base (11)..(11): 2'-OMe-nucleotide
  modified_base (12)..(12): 2'-fluoro-nucleotide
  modified_base (13)..(13): 2'-OMe-nucleotide
  modified_base (14)..(14): 2'-fluoro-nucleotide
  modified_base (15)..(15): 2'-OMe-nucleotide
  modified_base (16)..(16): 2'-fluoro-nucleotide
  modified_base (17)..(17): 2'-OMe-nucleotide
  modified_base (18)..(18): 2'-fluoro-nucleotide
  modified_base (19)..(19): 2'-OMe-nucleotide
  modified_base (20)..(20): dT
  modified_base (21)..(21): dT
uuggaucugggaccaccgutt

SEQ ID NO: 1022 - DNA, 21 bp, Artificial Sequence
  source: /note="Description of Artificial Sequence: Synthetic oligonucleotide"
  source: /note="Description of Combined DNA/RNA Molecule: Synthetic oligonucleotide"
  modified_base (1)..(1): 2'-fluoro-nucleotide
  modified_base (2)..(2): 2'-fluoro-nucleotide
  modified_base (3)..(3): 2'-OMe-nucleotide
  modified_base (4)..(4): 2'-fluoro-nucleotide
  modified_base (5)..(5): 2'-OMe-nucleotide
  modified_base (6)..(6): 2'-fluoro-nucleotide
  modified_base (7)..(7): 2'-OMe-nucleotide
  modified_base (8)..(8): 2'-fluoro-nucleotide
  modified_base (9)..(9): 2'-OMe-nucleotide
  modified_base (10)..(10): 2'-fluoro-nucleotide
  modified_base (11)..(11): 2'-OMe-nucleotide
  modified_base (12)..(12): 2'-fluoro-nucleotide
  modified_base (13)..(13): 2'-OMe-nucleotide
  modified_base (14)..(14): 2'-fluoro-nucleotide
  modified_base (15)..(15): 2'-OMe-nucleotide
  modified_base (16)..(16): 2'-fluoro-nucleotide
  modified_base (17)..(17): 2'-OMe-nucleotide
  modified_base (18)..(18): 2'-fluoro-nucleotide
  modified_base (19)..(19): 2'-OMe-nucleotide
  modified_base (20)..(20): dT
  modified_base (21)..(21): dT
gugcuuggaucugggaccatt

SEQ ID NO: 1023 - DNA, 21 bp, Artificial Sequence
  source: /note="Description of Artificial Sequence: Synthetic oligonucleotide"
  source: /note="Description of Combined DNA/RNA Molecule: Synthetic oligonucleotide"
  modified_base (1)..(1): 2'-fluoro-nucleotide
  modified_base (2)..(2): 2'-fluoro-nucleotide
  modified_base (3)..(3): 2'-OMe-nucleotide
  modified_base (4)..(4): 2'-fluoro-nucleotide
  modified_base (5)..(5): 2'-OMe-nucleotide
  modified_base (6)..(6): 2'-fluoro-nucleotide
  modified_base (7)..(7): 2'-OMe-nucleotide
  modified_base (8)..(8): 2'-fluoro-nucleotide
  modified_base (9)..(9): 2'-OMe-nucleotide
  modified_base (10)..(10): 2'-fluoro-nucleotide
  modified_base (11)..(11): 2'-OMe-nucleotide
  modified_base (12)..(12): 2'-fluoro-nucleotide
  modified_base (13)..(13): 2'-OMe-nucleotide
  modified_base (14)..(14): 2'-fluoro-nucleotide
  modified_base (15)..(15): 2'-OMe-nucleotide
  modified_base (16)..(16): 2'-fluoro-nucleotide
  modified_base (17)..(17): 2'-OMe-nucleotide
  modified_base (18)..(18): 2'-fluoro-nucleotide
  modified_base (19)..(19): 2'-OMe-nucleotide
  modified_base (20)..(20): dT
  modified_base (21)..(21): dT
ucugugcuuggaucugggatt

SEQ ID NO: 1024 - DNA, 21 bp, Artificial Sequence
  source: /note="Description of Artificial Sequence: Synthetic oligonucleotide"
  source: /note="Description of Combined DNA/RNA Molecule: Synthetic oligonucleotide"
  modified_base (1)..(1): 2'-fluoro-nucleotide
  modified_base (2)..(2): 2'-fluoro-nucleotide
  modified_base (3)..(3): 2'-OMe-nucleotide
  modified_base (4)..(4): 2'-fluoro-nucleotide
  modified_base (5)..(5): 2'-OMe-nucleotide
  modified_base (6)..(6): 2'-fluoro-nucleotide
  modified_base (7)..(7): 2'-OMe-nucleotide
  modified_base (8)..(8): 2'-fluoro-nucleotide
  modified_base (9)..(9): 2'-OMe-nucleotide
  modified_base (10)..(10): 2'-fluoro-nucleotide
  modified_base (11)..(11): 2'-OMe-nucleotide
  modified_base (12)..(12): 2'-fluoro-nucleotide
  modified_base (13)..(13): 2'-OMe-nucleotide
  modified_base (14)..(14): 2'-fluoro-nucleotide
  modified_base (15)..(15): 2'-OMe-nucleotide
  modified_base (16)..(16): 2'-fluoro-nucleotide
  modified_base (17)..(17): 2'-OMe-nucleotide
  modified_base (18)..(18): 2'-fluoro-nucleotide
  modified_base (19)..(19): 2'-OMe-nucleotide
  modified_base (20)..(20): dT
  modified_base (21)..(21): dT
agccucugugcuuggaucutt

SEQ ID NO: 1025 - DNA, 21 bp, Artificial Sequence
  source: /note="Description of Artificial Sequence: Synthetic oligonucleotide"
  source: /note="Description of Combined DNA/RNA Molecule: Synthetic oligonucleotide"
  modified_base (1)..(1): 2'-fluoro-nucleotide
  modified_base (2)..(2): 2'-fluoro-nucleotide
  modified_base (3)..(3): 2'-OMe-nucleotide
  modified_base (4)..(4): 2'-fluoro-nucleotide
  modified_base (5)..(5): 2'-OMe-nucleotide
  modified_base (6)..(6): 2'-fluoro-nucleotide
  modified_base (7)..(7): 2'-OMe-nucleotide
  modified_base (8)..(8): 2'-fluoro-nucleotide
  modified_base (9)..(9): 2'-OMe-nucleotide
  modified_base (10)..(10): 2'-fluoro-nucleotide
  modified_base (11)..(11): 2'-OMe-nucleotide
  modified_base (12)..(12): 2'-fluoro-nucleotide
  modified_base (13)..(13): 2'-OMe-nucleotide
  modified_base (14)..(14): 2'-fluoro-nucleotide
  modified_base (15)..(15): 2'-OMe-nucleotide
  modified_base (16)..(16): 2'-fluoro-nucleotide
  modified_base (17)..(17): 2'-OMe-nucleotide
  modified_base (18)..(18): 2'-fluoro-nucleotide
  modified_base (19)..(19): 2'-OMe-nucleotide
  modified_base (20)..(20): dT
  modified_base (21)..(21): dT
aagccucugugcuuggauctt

SEQ ID NO: 1026 - DNA, 21 bp, Artificial Sequence
  source: /note="Description of Artificial Sequence: Synthetic oligonucleotide"
  source: /note="Description of Combined DNA/RNA Molecule: Synthetic oligonucleotide"
  modified_base (1)..(1): 2'-fluoro-nucleotide
  modified_base (2)..(2): 2'-fluoro-nucleotide
  modified_base (3)..(3): 2'-OMe-nucleotide
  modified_base (4)..(4): 2'-fluoro-nucleotide
  modified_base (5)..(5): 2'-OMe-nucleotide
  modified_base (6)..(6): 2'-fluoro-nucleotide
  modified_base (7)..(7): 2'-OMe-nucleotide
  modified_base (8)..(8): 2'-fluoro-nucleotide
  modified_base (9)..(9): 2'-OMe-nucleotide
  modified_base (10)..(10): 2'-fluoro-nucleotide
  modified_base (11)..(11): 2'-OMe-nucleotide
  modified_base (12)..(12): 2'-fluoro-nucleotide
  modified_base (13)..(13): 2'-OMe-nucleotide
  modified_base (14)..(14): 2'-fluoro-nucleotide
  modified_base (15)..(15): 2'-OMe-nucleotide
  modified_base (16)..(16): 2'-fluoro-nucleotide
  modified_base (17)..(17): 2'-OMe-nucleotide
  modified_base (18)..(18): 2'-fluoro-nucleotide
  modified_base (19)..(19): 2'-OMe-nucleotide
  modified_base (20)..(20): dT
  modified_base (21)..(21): dT
gaagccucugugcuuggautt

SEQ ID NO: 1027 - DNA, 21 bp, Artificial Sequence
  source: /note="Description of Artificial Sequence: Synthetic oligonucleotide"
  source: /note="Description of Combined DNA/RNA Molecule: Synthetic oligonucleotide"
  modified_base (1)..(1): 2'-fluoro-nucleotide
  modified_base (2)..(2): 2'-fluoro-nucleotide
  modified_base (3)..(3): 2'-OMe-nucleotide
  modified_base (4)..(4): 2'-fluoro-nucleotide
  modified_base (5)..(5): 2'-OMe-nucleotide
  modified_base (6)..(6): 2'-fluoro-nucleotide
  modified_base (7)..(7): 2'-OMe-nucleotide
  modified_base (8)..(8): 2'-fluoro-nucleotide
  modified_base (9)..(9): 2'-OMe-nucleotide
  modified_base (10)..(10): 2'-fluoro-nucleotide
  modified_base (11)..(11): 2'-OMe-nucleotide
  modified_base (12)..(12): 2'-fluoro-nucleotide
  modified_base (13)..(13): 2'-OMe-nucleotide
  modified_base (14)..(14): 2'-fluoro-nucleotide
  modified_base (15)..(15): 2'-OMe-nucleotide
  modified_base (16)..(16): 2'-fluoro-nucleotide
  modified_base (17)..(17): 2'-OMe-nucleotide
  modified_base (18)..(18): 2'-fluoro-nucleotide
  modified_base (19)..(19): 2'-OMe-nucleotide
  modified_base (20)..(20): dT
  modified_base (21)..(21): dT
cuuccugugacagugguagtt

SEQ ID NO: 1028 - DNA, 21 bp, Artificial Sequence
  source: /note="Description of Artificial Sequence: Synthetic oligonucleotide"
  source: /note="Description of Combined DNA/RNA Molecule: Synthetic oligonucleotide"
  modified_base (1)..(1): 2'-fluoro-nucleotide
  modified_base (2)..(2): 2'-fluoro-nucleotide
  modified_base (3)..(3): 2'-OMe-nucleotide
  modified_base (4)..(4): 2'-fluoro-nucleotide
  modified_base (5)..(5): 2'-OMe-nucleotide
  modified_base (6)..(6): 2'-fluoro-nucleotide
  modified_base (7)..(7): 2'-OMe-nucleotide
  modified_base (8)..(8): 2'-fluoro-nucleotide
  modified_base (9)..(9): 2'-OMe-nucleotide
  modified_base (10)..(10): 2'-fluoro-nucleotide
  modified_base (11)..(11): 2'-OMe-nucleotide
  modified_base (12)..(12): 2'-fluoro-nucleotide
  modified_base (13)..(13): 2'-OMe-nucleotide
  modified_base (14)..(14): 2'-fluoro-nucleotide
  modified_base (15)..(15): 2'-OMe-nucleotide
  modified_base (16)..(16): 2'-fluoro-nucleotide
  modified_base (17)..(17): 2'-OMe-nucleotide
  modified_base (18)..(18): 2'-fluoro-nucleotide
  modified_base (19)..(19): 2'-OMe-nucleotide
  modified_base (20)..(20): dT
  modified_base (21)..(21): dT
acauugcgucagguugcagtt

SEQ ID NO: 1029 - DNA, 21 bp, Artificial Sequence
  source: /note="Description of Artificial Sequence: Synthetic oligonucleotide"
  source: /note="Description of Combined DNA/RNA Molecule: Synthetic oligonucleotide"
  modified_base (1)..(1): 2'-fluoro-nucleotide
  modified_base (2)..(2): 2'-fluoro-nucleotide
  modified_base (3)..(3): 2'-OMe-nucleotide
  modified_base (4)..(4): 2'-fluoro-nucleotide
  modified_base (5)..(5): 2'-OMe-nucleotide
  modified_base (6)..(6): 2'-fluoro-nucleotide
  modified_base (7)..(7): 2'-OMe-nucleotide
  modified_base (8)..(8): 2'-fluoro-nucleotide
  modified_base (9)..(9): 2'-OMe-nucleotide
  modified_base (10)..(10): 2'-fluoro-nucleotide
  modified_base (11)..(11): 2'-OMe-nucleotide
  modified_base (12)..(12): 2'-fluoro-nucleotide
  modified_base (13)..(13): 2'-OMe-nucleotide
  modified_base (14)..(14): 2'-fluoro-nucleotide
  modified_base (15)..(15): 2'-OMe-nucleotide
  modified_base (16)..(16): 2'-fluoro-nucleotide
  modified_base (17)..(17): 2'-OMe-nucleotide
  modified_base (18)..(18): 2'-fluoro-nucleotide
  modified_base (19)..(19): 2'-OMe-nucleotide
  modified_base (20)..(20): dT
  modified_base (21)..(21): dT
gacauugcgucagguugcatt

SEQ ID NO: 1030 - DNA, 21 bp, Artificial Sequence
  source: /note="Description of Artificial Sequence: Synthetic oligonucleotide"
  source: /note="Description of Combined DNA/RNA Molecule: Synthetic oligonucleotide"
  modified_base (1)..(1): 2'-fluoro-nucleotide
  modified_base (2)..(2): 2'-fluoro-nucleotide
  modified_base (3)..(3): 2'-OMe-nucleotide
  modified_base (4)..(4): 2'-fluoro-nucleotide
  modified_base (5)..(5): 2'-OMe-nucleotide
  modified_base (6)..(6): 2'-fluoro-nucleotide
  modified_base (7)..(7): 2'-OMe-nucleotide
  modified_base (8)..(8): 2'-fluoro-nucleotide
  modified_base (9)..(9): 2'-OMe-nucleotide
  modified_base (10)..(10): 2'-fluoro-nucleotide
  modified_base (11)..(11): 2'-OMe-nucleotide
  modified_base (12)..(12): 2'-fluoro-nucleotide
  modified_base (13)..(13): 2'-OMe-nucleotide
  modified_base (14)..(14): 2'-fluoro-nucleotide
  modified_base (15)..(15): 2'-OMe-nucleotide
  modified_base (16)..(16): 2'-fluoro-nucleotide
  modified_base (17)..(17): 2'-OMe-nucleotide
  modified_base (18)..(18): 2'-fluoro-nucleotide
  modified_base (19)..(19): 2'-OMe-nucleotide
  modified_base (20)..(20): dT
  modified_base (21)..(21): dT
ggacauugcgucagguugctt

SEQ ID NO: 1031 - DNA, 21 bp, Artificial Sequence
  source: /note="Description of Artificial Sequence: Synthetic oligonucleotide"
  source: /note="Description of Combined DNA/RNA Molecule: Synthetic oligonucleotide"
  modified_base (1)..(1): 2'-fluoro-nucleotide
  modified_base (2)..(2): 2'-fluoro-nucleotide
  modified_base (3)..(3): 2'-OMe-nucleotide
  modified_base (4)..(4): 2'-fluoro-nucleotide
  modified_base (5)..(5): 2'-OMe-nucleotide
  modified_base (6)..(6): 2'-fluoro-nucleotide
  modified_base (7)..(7): 2'-OMe-nucleotide
  modified_base (8)..(8): 2'-fluoro-nucleotide
  modified_base (9)..(9): 2'-OMe-nucleotide
  modified_base (10)..(10): 2'-fluoro-nucleotide
  modified_base (11)..(11): 2'-OMe-nucleotide
  modified_base (12)..(12): 2'-fluoro-nucleotide
  modified_base (13)..(13): 2'-OMe-nucleotide
  modified_base (14)..(14): 2'-fluoro-nucleotide
  modified_base (15)..(15): 2'-OMe-nucleotide
  modified_base (16)..(16): 2'-fluoro-nucleotide
  modified_base (17)..(17): 2'-OMe-nucleotide
  modified_base (18)..(18): 2'-fluoro-nucleotide
  modified_base (19)..(19): 2'-OMe-nucleotide
  modified_base (20)..(20): dT
  modified_base (21)..(21): dT
accccagugcuguuuucagtt

SEQ ID NO: 1032 - DNA, 21 bp, Artificial Sequence
  source: /note="Description of Artificial Sequence: Synthetic oligonucleotide"
  source: /note="Description of Combined DNA/RNA Molecule: Synthetic oligonucleotide"
  modified_base (1)..(1): 2'-fluoro-nucleotide
  modified_base (2)..(2): 2'-fluoro-nucleotide
  modified_base (3)..(3): 2'-OMe-nucleotide
  modified_base (4)..(4): 2'-fluoro-nucleotide
  modified_base (5)..(5): 2'-OMe-nucleotide
  modified_base (6)..(6): 2'-fluoro-nucleotide
  modified_base (7)..(7): 2'-OMe-nucleotide
  modified_base (8)..(8): 2'-fluoro-nucleotide
  modified_base (9)..(9): 2'-OMe-nucleotide
  modified_base (10)..(10): 2'-fluoro-nucleotide
  modified_base (11)..(11): 2'-OMe-nucleotide
  modified_base (12)..(12): 2'-fluoro-nucleotide
  modified_base (13)..(13): 2'-OMe-nucleotide
  modified_base (14)..(14): 2'-fluoro-nucleotide
  modified_base (15)..(15): 2'-OMe-nucleotide
  modified_base (16)..(16): 2'-fluoro-nucleotide
  modified_base (17)..(17): 2'-OMe-nucleotide
  modified_base (18)..(18): 2'-fluoro-nucleotide
  modified_base (19)..(19): 2'-OMe-nucleotide
  modified_base (20)..(20): dT
  modified_base (21)..(21): dT
gugugccucgauaacucugtt

SEQ ID NO: 1033 - DNA, 21 bp, Artificial Sequence
  source: /note="Description of Artificial Sequence: Synthetic oligonucleotide"
  source: /note="Description of Combined DNA/RNA Molecule: Synthetic oligonucleotide"
  modified_base (1)..(1): 2'-fluoro-nucleotide
  modified_base (2)..(2): 2'-fluoro-nucleotide
  modified_base (3)..(3): 2'-OMe-nucleotide
  modified_base (4)..(4): 2'-fluoro-nucleotide
  modified_base (5)..(5): 2'-OMe-nucleotide
  modified_base (6)..(6): 2'-fluoro-nucleotide
  modified_base (7)..(7): 2'-OMe-nucleotide
  modified_base (8)..(8): 2'-fluoro-nucleotide
  modified_base (9)..(9): 2'-OMe-nucleotide
  modified_base (10)..(10): 2'-fluoro-nucleotide
  modified_base (11)..(11): 2'-OMe-nucleotide
  modified_base (12)..(12): 2'-fluoro-nucleotide
  modified_base (13)..(13): 2'-OMe-nucleotide
  modified_base (14)..(14): 2'-fluoro-nucleotide
  modified_base (15)..(15): 2'-OMe-nucleotide
  modified_base (16)..(16): 2'-fluoro-nucleotide
  modified_base (17)..(17): 2'-OMe-nucleotide
  modified_base (18)..(18): 2'-fluoro-nucleotide
  modified_base (19)..(19): 2'-OMe-nucleotide
  modified_base (20)..(20): dT
  modified_base (21)..(21): dT
agugugccucgauaacucutt

SEQ ID NO: 1034 - DNA, 21 bp, Artificial Sequence
  source: /note="Description of Artificial Sequence: Synthetic oligonucleotide"
  source: /note="Description of Combined DNA/RNA Molecule: Synthetic oligonucleotide"
  modified_base (1)..(1): 2'-fluoro-nucleotide
  modified_base (2)..(2): 2'-fluoro-nucleotide
  modified_base (3)..(3): 2'-OMe-nucleotide
  modified_base (4)..(4): 2'-fluoro-nucleotide
  modified_base (5)..(5): 2'-OMe-nucleotide
  modified_base (6)..(6): 2'-fluoro-nucleotide
  modified_base (7)..(7): 2'-OMe-nucleotide
  modified_base (8)..(8): 2'-fluoro-nucleotide
  modified_base (9)..(9): 2'-OMe-nucleotide
  modified_base (10)..(10): 2'-fluoro-nucleotide
  modified_base (11)..(11): 2'-OMe-nucleotide
  modified_base (12)..(12): 2'-fluoro-nucleotide
  modified_base (13)..(13): 2'-OMe-nucleotide
  modified_base (14)..(14): 2'-fluoro-nucleotide
  modified_base (15)..(15): 2'-OMe-nucleotide
  modified_base (16)..(16): 2'-fluoro-nucleotide
  modified_base (17)..(17): 2'-OMe-nucleotide
  modified_base (18)..(18): 2'-fluoro-nucleotide
  modified_base (19)..(19): 2'-OMe-nucleotide
  modified_base (20)..(20): dT
  modified_base (21)..(21): dT
gagugugccucgauaacuctt

SEQ ID NO: 1035 - DNA, 21 bp, Artificial Sequence
  source: /note="Description of Artificial Sequence: Synthetic oligonucleotide"
  source: /note="Description of Combined DNA/RNA Molecule: Synthetic oligonucleotide"
  modified_base (1)..(1): 2'-fluoro-nucleotide
  modified_base (2)..(2): 2'-fluoro-nucleotide
  modified_base (3)..(3): 2'-OMe-nucleotide
  modified_base (4)..(4): 2'-fluoro-nucleotide
  modified_base (5)..(5): 2'-OMe-nucleotide
  modified_base (6)..(6): 2'-fluoro-nucleotide
  modified_base (7)..(7): 2'-OMe-nucleotide
  modified_base (8)..(8): 2'-fluoro-nucleotide
  modified_base (9)..(9): 2'-OMe-nucleotide
  modified_base (10)..(10): 2'-fluoro-nucleotide
  modified_base (11)..(11): 2'-OMe-nucleotide
  modified_base (12)..(12): 2'-fluoro-nucleotide
  modified_base (13)..(13): 2'-OMe-nucleotide
  modified_base (14)..(14): 2'-fluoro-nucleotide
  modified_base (15)..(15): 2'-OMe-nucleotide
  modified_base (16)..(16): 2'-fluoro-nucleotide
  modified_base (17)..(17): 2'-OMe-nucleotide
  modified_base (18)..(18): 2'-fluoro-nucleotide
  modified_base (19)..(19): 2'-OMe-nucleotide
  modified_base (20)..(20): dT
  modified_base (21)..(21): dT
agagugugccucgauaacutt

SEQ ID NO: 1036 - DNA, 21 bp, Artificial Sequence
  source: /note="Description of Artificial Sequence: Synthetic oligonucleotide"
  source: /note="Description of Combined DNA/RNA Molecule: Synthetic oligonucleotide"
  modified_base (1)..(1): 2'-fluoro-nucleotide
  modified_base (2)..(2): 2'-fluoro-nucleotide
  modified_base (3)..(3): 2'-OMe-nucleotide
  modified_base (4)..(4): 2'-fluoro-nucleotide
  modified_base (5)..(5): 2'-OMe-nucleotide
  modified_base (6)..(6): 2'-fluoro-nucleotide
  modified_base (7)..(7): 2'-OMe-nucleotide
  modified_base (8)..(8): 2'-fluoro-nucleotide
  modified_base (9)..(9): 2'-OMe-nucleotide
  modified_base (10)..(10): 2'-fluoro-nucleotide
  modified_base (11)..(11): 2'-OMe-nucleotide
  modified_base (12)..(12): 2'-fluoro-nucleotide
  modified_base (13)..(13): 2'-OMe-nucleotide
  modified_base (14)..(14): 2'-fluoro-nucleotide
  modified_base (15)..(15): 2'-OMe-nucleotide
  modified_base (16)..(16): 2'-fluoro-nucleotide
  modified_base (17)..(17): 2'-OMe-nucleotide
  modified_base (18)..(18): 2'-fluoro-nucleotide
  modified_base (19)..(19): 2'-OMe-nucleotide
  modified_base (20)..(20): dT
  modified_base (21)..(21): dT
gagagugugccucgauaactt

SEQ ID NO: 1037 - DNA, 21 bp, Artificial Sequence
  source: /note="Description of Artificial Sequence: Synthetic oligonucleotide"
  source: /note="Description of Combined DNA/RNA Molecule: Synthetic oligonucleotide"
  modified_base (1)..(1): 2'-fluoro-nucleotide
  modified_base (2)..(2): 2'-fluoro-nucleotide
  modified_base (3)..(3): 2'-OMe-nucleotide
  modified_base (4)..(4): 2'-fluoro-nucleotide
  modified_base (5)..(5): 2'-OMe-nucleotide
  modified_base (6)..(6): 2'-fluoro-nucleotide
  modified_base (7)..(7): 2'-OMe-nucleotide
  modified_base (8)..(8): 2'-fluoro-nucleotide
  modified_base (9)..(9): 2'-OMe-nucleotide
  modified_base (10)..(10): 2'-fluoro-nucleotide
  modified_base (11)..(11): 2'-OMe-nucleotide
  modified_base (12)..(12): 2'-fluoro-nucleotide
  modified_base (13)..(13): 2'-OMe-nucleotide
  modified_base (14)..(14): 2'-fluoro-nucleotide
  modified_base (15)..(15): 2'-OMe-nucleotide
  modified_base (16)..(16): 2'-fluoro-nucleotide
  modified_base (17)..(17): 2'-OMe-nucleotide
  modified_base (18)..(18): 2'-fluoro-nucleotide
  modified_base (19)..(19): 2'-OMe-nucleotide
  modified_base (20)..(20): dT
  modified_base (21)..(21): dT
ggagagugugccucgauaatt

SEQ ID NO: 1038 - DNA, 21 bp, Artificial Sequence
  source: /note="Description of Artificial Sequence: Synthetic oligonucleotide"
  source: /note="Description of Combined DNA/RNA Molecule: Synthetic oligonucleotide"
  modified_base (1)..(1): 2'-fluoro-nucleotide
  modified_base (2)..(2): 2'-fluoro-nucleotide
  modified_base (3)..(3): 2'-OMe-nucleotide
  modified_base (4)..(4): 2'-fluoro-nucleotide
  modified_base (5)..(5): 2'-OMe-nucleotide
  modified_base (6)..(6): 2'-fluoro-nucleotide
  modified_base (7)..(7): 2'-OMe-nucleotide
  modified_base (8)..(8): 2'-fluoro-nucleotide
  modified_base (9)..(9): 2'-OMe-nucleotide
  modified_base (10)..(10): 2'-fluoro-nucleotide
  modified_base (11)..(11): 2'-OMe-nucleotide
  modified_base (12)..(12): 2'-fluoro-nucleotide
  modified_base (13)..(13): 2'-OMe-nucleotide
  modified_base (14)..(14): 2'-fluoro-nucleotide
  modified_base (15)..(15): 2'-OMe-nucleotide
  modified_base (16)..(16): 2'-fluoro-nucleotide
  modified_base (17)..(17): 2'-OMe-nucleotide
  modified_base (18)..(18): 2'-fluoro-nucleotide
  modified_base (19)..(19): 2'-OMe-nucleotide
  modified_base (20)..(20): dT
  modified_base (21)..(21): dT
uggagagugugccucgauatt

SEQ ID NO: 1039 - DNA, 21 bp, Artificial Sequence
  source: /note="Description of Artificial Sequence: Synthetic oligonucleotide"
  source: /note="Description of Combined DNA/RNA Molecule: Synthetic oligonucleotide"
  modified_base (1)..(1): 2'-fluoro-nucleotide
  modified_base (2)..(2): 2'-fluoro-nucleotide
  modified_base (3)..(3): 2'-OMe-nucleotide
  modified_base (4)..(4): 2'-fluoro-nucleotide
  modified_base (5)..(5): 2'-OMe-nucleotide
  modified_base (6)..(6): 2'-fluoro-nucleotide
  modified_base (7)..(7): 2'-OMe-nucleotide
  modified_base (8)..(8): 2'-fluoro-nucleotide
  modified_base (9)..(9): 2'-OMe-nucleotide
  modified_base (10)..(10): 2'-fluoro-nucleotide
  modified_base (11)..(11): 2'-OMe-nucleotide
  modified_base (12)..(12): 2'-fluoro-nucleotide
  modified_base (13)..(13): 2'-OMe-nucleotide
  modified_base (14)..(14): 2'-fluoro-nucleotide
  modified_base (15)..(15): 2'-OMe-nucleotide
  modified_base (16)..(16): 2'-fluoro-nucleotide
  modified_base (17)..(17): 2'-OMe-nucleotide
  modified_base (18)..(18): 2'-fluoro-nucleotide
  modified_base (19)..(19): 2'-OMe-nucleotide
  modified_base (20)..(20): dT
  modified_base (21)..(21): dT
guggagagugugccucgautt

SEQ ID NO: 1040 - DNA, 21 bp, Artificial Sequence
  source: /note="Description of Artificial Sequence: Synthetic oligonucleotide"
  source: /note="Description of Combined DNA/RNA Molecule: Synthetic oligonucleotide"
  modified_base (1)..(1): 2'-fluoro-nucleotide
  modified_base (2)..(2): 2'-fluoro-nucleotide
  modified_base (3)..(3): 2'-OMe-nucleotide
  modified_base (4)..(4): 2'-fluoro-nucleotide
  modified_base (5)..(5): 2'-OMe-nucleotide
  modified_base (6)..(6): 2'-fluoro-nucleotide
  modified_base (7)..(7): 2'-OMe-nucleotide
  modified_base (8)..(8): 2'-fluoro-nucleotide
  modified_base (9)..(9): 2'-OMe-nucleotide
  modified_base (10)..(10): 2'-fluoro-nucleotide
  modified_base (11)..(11): 2'-OMe-nucleotide
  modified_base (12)..(12): 2'-fluoro-nucleotide
  modified_base (13)..(13): 2'-OMe-nucleotide
  modified_base (14)..(14): 2'-fluoro-nucleotide
  modified_base (15)..(15): 2'-OMe-nucleotide
  modified_base (16)..(16): 2'-fluoro-nucleotide
  modified_base (17)..(17): 2'-OMe-nucleotide
  modified_base (18)..(18): 2'-fluoro-nucleotide
  modified_base (19)..(19): 2'-OMe-nucleotide
  modified_base (20)..(20): dT
  modified_base (21)..(21): dT
uagugguggagagugugcctt

SEQ ID NO: 1041 - DNA, 21 bp, Artificial Sequence
  source: /note="Description of Artificial Sequence: Synthetic oligonucleotide"
  source: /note="Description of Combined DNA/RNA Molecule: Synthetic oligonucleotide"
  modified_base (1)..(1): 2'-fluoro-nucleotide
  modified_base (2)..(2): 2'-fluoro-nucleotide
  modified_base (3)..(3): 2'-OMe-nucleotide
  modified_base (4)..(4): 2'-fluoro-nucleotide
  modified_base (5)..(5): 2'-OMe-nucleotide
  modified_base (6)..(6): 2'-fluoro-nucleotide
  modified_base (7)..(7): 2'-OMe-nucleotide
  modified_base (8)..(8): 2'-fluoro-nucleotide
  modified_base (9)..(9): 2'-OMe-nucleotide
  modified_base (10)..(10): 2'-fluoro-nucleotide
  modified_base (11)..(11): 2'-OMe-nucleotide
  modified_base (12)..(12): 2'-fluoro-nucleotide
  modified_base (13)..(13): 2'-OMe-nucleotide
  modified_base (14)..(14): 2'-fluoro-nucleotide
  modified_base (15)..(15): 2'-OMe-nucleotide
  modified_base (16)..(16): 2'-fluoro-nucleotide
  modified_base (17)..(17): 2'-OMe-nucleotide
  modified_base (18)..(18): 2'-fluoro-nucleotide
  modified_base (19)..(19): 2'-OMe-nucleotide
  modified_base (20)..(20): dT
  modified_base (21)..(21): dT
ccugugauagugguggagatt

SEQ ID NO: 1042 - DNA, 21 bp, Artificial Sequence
  source: /note="Description of Artificial Sequence: Synthetic oligonucleotide"
  source: /note="Description of Combined DNA/RNA Molecule: Synthetic oligonucleotide"
  modified_base (1)..(1): 2'-fluoro-nucleotide
  modified_base (2)..(2): 2'-fluoro-nucleotide
  modified_base (3)..(3): 2'-OMe-nucleotide
  modified_base (4)..(4): 2'-fluoro-nucleotide
  modified_base (5)..(5): 2'-OMe-nucleotide
  modified_base (6)..(6): 2'-fluoro-nucleotide
  modified_base (7)..(7): 2'-OMe-nucleotide
  modified_base (8)..(8): 2'-fluoro-nucleotide
  modified_base (9)..(9): 2'-OMe-nucleotide
  modified_base (10)..(10): 2'-fluoro-nucleotide
  modified_base (11)..(11): 2'-OMe-nucleotide
  modified_base (12)..(12): 2'-fluoro-nucleotide
  modified_base (13)..(13): 2'-OMe-nucleotide
  modified_base (14)..(14): 2'-fluoro-nucleotide
  modified_base (15)..(15): 2'-OMe-nucleotide
  modified_base (16)..(16): 2'-fluoro-nucleotide
  modified_base (17)..(17): 2'-OMe-nucleotide
  modified_base (18)..(18): 2'-fluoro-nucleotide
  modified_base (19)..(19): 2'-OMe-nucleotide
  modified_base (20)..(20): dT
  modified_base (21)..(21): dT
ccaauguggugucauagactt

SEQ ID NO: 1043 - DNA, 21 bp, Artificial Sequence
  source: /note="Description of Artificial Sequence: Synthetic oligonucleotide"
  source: /note="Description of Combined DNA/RNA Molecule: Synthetic oligonucleotide"
  modified_base (1)..(1): 2'-fluoro-nucleotide
  modified_base (2)..(2): 2'-fluoro-nucleotide
  modified_base (3)..(3): 2'-OMe-nucleotide
  modified_base (4)..(4): 2'-fluoro-nucleotide
  modified_base (5)..(5): 2'-OMe-nucleotide
  modified_base (6)..(6): 2'-fluoro-nucleotide
  modified_base (7)..(7): 2'-OMe-nucleotide
  modified_base (8)..(8): 2'-fluoro-nucleotide
  modified_base (9)..(9): 2'-OMe-nucleotide
  modified_base (10)..(10): 2'-fluoro-nucleotide
  modified_base (11)..(11): 2'-OMe-nucleotide
  modified_base (12)..(12): 2'-fluoro-nucleotide
  modified_base (13)..(13): 2'-OMe-nucleotide
  modified_base (14)..(14): 2'-fluoro-nucleotide
  modified_base (15)..(15): 2'-OMe-nucleotide
  modified_base (16)..(16): 2'-fluoro-nucleotide
  modified_base (17)..(17): 2'-OMe-nucleotide
  modified_base (18)..(18): 2'-fluoro-nucleotide
  modified_base (19)..(19): 2'-OMe-nucleotide
  modified_base (20)..(20): dT
  modified_base (21)..(21): dT
augccaauguggugucauatt

SEQ ID NO: 1044 - DNA, 21 bp, Artificial Sequence
  source: /note="Description of Artificial Sequence: Synthetic oligonucleotide"
  source: /note="Description of Combined DNA/RNA Molecule: Synthetic oligonucleotide"
  modified_base (1)..(1): 2'-fluoro-nucleotide
  modified_base (2)..(2): 2'-fluoro-nucleotide
  modified_base (3)..(3): 2'-OMe-nucleotide
  modified_base (4)..(4): 2'-fluoro-nucleotide
  modified_base (5)..(5): 2'-OMe-nucleotide
  modified_base (6)..(6): 2'-fluoro-nucleotide
  modified_base (7)..(7): 2'-OMe-nucleotide
  modified_base (8)..(8): 2'-fluoro-nucleotide
  modified_base (9)..(9): 2'-OMe-nucleotide
  modified_base (10)..(10): 2'-fluoro-nucleotide
  modified_base (11)..(11): 2'-OMe-nucleotide
  modified_base (12)..(12): 2'-fluoro-nucleotide
  modified_base (13)..(13): 2'-OMe-nucleotide
  modified_base (14)..(14): 2'-fluoro-nucleotide
  modified_base (15)..(15): 2'-OMe-nucleotide
  modified_base (16)..(16): 2'-fluoro-nucleotide
  modified_base (17)..(17): 2'-OMe-nucleotide
  modified_base (18)..(18): 2'-fluoro-nucleotide
  modified_base (19)..(19): 2'-OMe-nucleotide
  modified_base (20)..(20): dT
  modified_base (21)..(21): dT
uccgaugccaauguggugutt

SEQ ID NO: 1045 - DNA, 21 bp, Artificial Sequence
  source: /note="Description of Artificial Sequence: Synthetic oligonucleotide"
  source: /note="Description of Combined DNA/RNA Molecule: Synthetic oligonucleotide"
  modified_base (1)..(1): 2'-fluoro-nucleotide
  modified_base (2)..(2): 2'-fluoro-nucleotide
  modified_base (3)..(3): 2'-OMe-nucleotide
  modified_base (4)..(4): 2'-fluoro-nucleotide
  modified_base (5)..(5): 2'-OMe-nucleotide
  modified_base (6)..(6): 2'-fluoro-nucleotide
  modified_base (7)..(7): 2'-OMe-nucleotide
  modified_base (8)..(8): 2'-fluoro-nucleotide
  modified_base (9)..(9): 2'-OMe-nucleotide
  modified_base (10)..(10): 2'-fluoro-nucleotide
  modified_base (11)..(11): 2'-OMe-nucleotide
  modified_base (12)..(12): 2'-fluoro-nucleotide
  modified_base (13)..(13): 2'-OMe-nucleotide
  modified_base (14)..(14): 2'-fluoro-nucleotide
  modified_base (15)..(15): 2'-OMe-nucleotide
  modified_base (16)..(16): 2'-fluoro-nucleotide
  modified_base (17)..(17): 2'-OMe-nucleotide
  modified_base (18)..(18): 2'-fluoro-nucleotide
  modified_base (19)..(19): 2'-OMe-nucleotide
  modified_base (20)..(20): dT
  modified_base (21)..(21): dT
cuccgaugccaauguggugtt

SEQ ID NO: 1046 - DNA, 21 bp, Artificial Sequence
  source: /note="Description of Artificial Sequence: Synthetic oligonucleotide"
  source: /note="Description of Combined DNA/RNA Molecule: Synthetic oligonucleotide"
  modified_base (1)..(1): 2'-fluoro-nucleotide
  modified_base (2)..(2): 2'-fluoro-nucleotide
  modified_base (3)..(3): 2'-OMe-nucleotide
  modified_base (4)..(4): 2'-fluoro-nucleotide
  modified_base (5)..(5): 2'-OMe-nucleotide
  modified_base (6)..(6): 2'-fluoro-nucleotide
  modified_base (7)..(7): 2'-OMe-nucleotide
  modified_base (8)..(8): 2'-fluoro-nucleotide
  modified_base (9)..(9): 2'-OMe-nucleotide
  modified_base (10)..(10): 2'-fluoro-nucleotide
  modified_base (11)..(11): 2'-OMe-nucleotide
  modified_base (12)..(12): 2'-fluoro-nucleotide
  modified_base (13)..(13): 2'-OMe-nucleotide
  modified_base (14)..(14): 2'-fluoro-nucleotide
  modified_base (15)..(15): 2'-OMe-nucleotide
  modified_base (16)..(16): 2'-fluoro-nucleotide
  modified_base (17)..(17): 2'-OMe-nucleotide
  modified_base (18)..(18): 2'-fluoro-nucleotide
  modified_base (19)..(19): 2'-OMe-nucleotide
  modified_base (20)..(20): dT
  modified_base (21)..(21): dT
ccuccgaugccaauguggutt

SEQ ID NO: 1047 - DNA, 21 bp, Artificial Sequence
  source: /note="Description of Artificial Sequence: Synthetic oligonucleotide"
  source: /note="Description of Combined DNA/RNA Molecule: Synthetic oligonucleotide"
  modified_base (1)..(1): 2'-fluoro-nucleotide
  modified_base (2)..(2): 2'-fluoro-nucleotide
  modified_base (3)..(3): 2'-OMe-nucleotide
  modified_base (4)..(4): 2'-fluoro-nucleotide
  modified_base (5)..(5): 2'-OMe-nucleotide
  modified_base (6)..(6): 2'-fluoro-nucleotide
  modified_base (7)..(7): 2'-OMe-nucleotide
  modified_base (8)..(8): 2'-fluoro-nucleotide
  modified_base (9)..(9): 2'-OMe-nucleotide
  modified_base (10)..(10): 2'-fluoro-nucleotide
  modified_base (11)..(11): 2'-OMe-nucleotide
  modified_base (12)..(12): 2'-fluoro-nucleotide
  modified_base (13)..(13): 2'-OMe-nucleotide
  modified_base (14)..(14): 2'-fluoro-nucleotide
  modified_base (15)..(15): 2'-OMe-nucleotide
  modified_base (16)..(16): 2'-fluoro-nucleotide
  modified_base (17)..(17): 2'-OMe-nucleotide
  modified_base (18)..(18): 2'-fluoro-nucleotide
  modified_base (19)..(19): 2'-OMe-nucleotide
  modified_base (20)..(20): dT
  modified_base (21)..(21): dT
uccuccgaugccaauguggtt

SEQ ID NO: 1048 - DNA, 21 bp, Artificial Sequence
  source: /note="Description of Artificial Sequence: Synthetic oligonucleotide"
  source: /note="Description of Combined DNA/RNA Molecule: Synthetic oligonucleotide"
  modified_base (1)..(1): 2'-fluoro-nucleotide
  modified_base (2)..(2): 2'-fluoro-nucleotide
  modified_base (3)..(3): 2'-OMe-nucleotide
  modified_base (4)..(4): 2'-fluoro-nucleotide
  modified_base (5)..(5): 2'-OMe-nucleotide
  modified_base (6)..(6): 2'-fluoro-nucleotide
  modified_base (7)..(7): 2'-OMe-nucleotide
  modified_base (8)..(8): 2'-fluoro-nucleotide
  modified_base (9)..(9): 2'-OMe-nucleotide
  modified_base (10)..(10): 2'-fluoro-nucleotide
  modified_base (11)..(11): 2'-OMe-nucleotide
  modified_base (12)..(12): 2'-fluoro-nucleotide
  modified_base (13)..(13): 2'-OMe-nucleotide
  modified_base (14)..(14): 2'-fluoro-nucleotide
  modified_base (15)..(15): 2'-OMe-nucleotide
  modified_base (16)..(16): 2'-fluoro-nucleotide
  modified_base (17)..(17): 2'-OMe-nucleotide
  modified_base (18)..(18): 2'-fluoro-nucleotide
  modified_base (19)..(19): 2'-OMe-nucleotide
  modified_base (20)..(20): dT
  modified_base (21)..(21): dT
auccuccgaugccaaugugtt

SEQ ID NO: 1049 - DNA, 21 bp, Artificial Sequence
  source: /note="Description of Artificial Sequence: Synthetic oligonucleotide"
  source: /note="Description of Combined DNA/RNA Molecule: Synthetic oligonucleotide"
  modified_base (1)..(1): 2'-fluoro-nucleotide
  modified_base (2)..(2): 2'-fluoro-nucleotide
  modified_base (3)..(3): 2'-OMe-nucleotide
  modified_base (4)..(4): 2'-fluoro-nucleotide
  modified_base (5)..(5): 2'-OMe-nucleotide
  modified_base (6)..(6): 2'-fluoro-nucleotide
  modified_base (7)..(7): 2'-OMe-nucleotide
  modified_base (8)..(8): 2'-fluoro-nucleotide
  modified_base (9)..(9): 2'-OMe-nucleotide
  modified_base (10)..(10): 2'-fluoro-nucleotide
  modified_base (11)..(11): 2'-OMe-nucleotide
  modified_base (12)..(12): 2'-fluoro-nucleotide
  modified_base (13)..(13): 2'-OMe-nucleotide
  modified_base (14)..(14): 2'-fluoro-nucleotide
  modified_base (15)..(15): 2'-OMe-nucleotide
  modified_base (16)..(16): 2'-fluoro-nucleotide
  modified_base (17)..(17): 2'-OMe-nucleotide
  modified_base (18)..(18): 2'-fluoro-nucleotide
  modified_base (19)..(19): 2'-OMe-nucleotide
  modified_base (20)..(20): dT
  modified_base (21)..(21): dT
gauccuccgaugccaaugutt

SEQ ID NO: 1050 - DNA, 21 bp, Artificial Sequence
  source: /note="Description of Artificial Sequence: Synthetic oligonucleotide"
  source: /note="Description of Combined DNA/RNA Molecule: Synthetic oligonucleotide"
  modified_base (1)..(1): 2'-fluoro-nucleotide
  modified_base (2)..(2): 2'-fluoro-nucleotide
  modified_base (3)..(3): 2'-OMe-nucleotide
  modified_base (4)..(4): 2'-fluoro-nucleotide
  modified_base (5)..(5): 2'-OMe-nucleotide
  modified_base (6)..(6): 2'-fluoro-nucleotide
  modified_base (7)..(7): 2'-OMe-nucleotide
  modified_base (8)..(8): 2'-fluoro-nucleotide
  modified_base (9)..(9): 2'-OMe-nucleotide
  modified_base (10)..(10): 2'-fluoro-nucleotide
  modified_base (11)..(11): 2'-OMe-nucleotide
  modified_base (12)..(12): 2'-fluoro-nucleotide
  modified_base (13)..(13): 2'-OMe-nucleotide
  modified_base (14)..(14): 2'-fluoro-nucleotide
  modified_base (15)..(15): 2'-OMe-nucleotide
  modified_base (16)..(16): 2'-fluoro-nucleotide
  modified_base (17)..(17): 2'-OMe-nucleotide
  modified_base (18)..(18): 2'-fluoro-nucleotide
  modified_base (19)..(19): 2'-OMe-nucleotide
  modified_base (20)..(20): dT
  modified_base (21)..(21): dT
ggauccuccgaugccaaugtt

SEQ ID NO: 1051 - DNA, 21 bp, Artificial Sequence
  source: /note="Description of Artificial Sequence: Synthetic oligonucleotide"
  source: /note="Description of Combined DNA/RNA Molecule: Synthetic oligonucleotide"
  modified_base (1)..(1): 2'-fluoro-nucleotide
  modified_base (2)..(2): 2'-fluoro-nucleotide
  modified_base (3)..(3): 2'-OMe-nucleotide
  modified_base (4)..(4): 2'-fluoro-nucleotide
  modified_base (5)..(5): 2'-OMe-nucleotide
  modified_base (6)..(6): 2'-fluoro-nucleotide
  modified_base (7)..(7): 2'-OMe-nucleotide
  modified_base (8)..(8): 2'-fluoro-nucleotide
  modified_base (9)..(9): 2'-OMe-nucleotide
  modified_base (10)..(10): 2'-fluoro-nucleotide
  modified_base (11)..(11): 2'-OMe-nucleotide
  modified_base (12)..(12): 2'-fluoro-nucleotide
  modified_base (13)..(13): 2'-OMe-nucleotide
  modified_base (14)..(14): 2'-fluoro-nucleotide
  modified_base (15)..(15): 2'-OMe-nucleotide
  modified_base (16)..(16): 2'-fluoro-nucleotide
  modified_base (17)..(17): 2'-OMe-nucleotide
  modified_base (18)..(18): 2'-fluoro-nucleotide
  modified_base (19)..(19): 2'-OMe-nucleotide
  modified_base (20)..(20): dT
  modified_base (21)..(21): dT
gggauccuccgaugccaautt

SEQ ID NO: 1052 - DNA, 21 bp, Artificial Sequence
  source: /note="Description of Artificial Sequence: Synthetic oligonucleotide"
  source: /note="Description of Combined DNA/RNA Molecule: Synthetic oligonucleotide"
  modified_base (1)..(1): 2'-fluoro-nucleotide
  modified_base (2)..(2): 2'-fluoro-nucleotide
  modified_base (3)..(3): 2'-OMe-nucleotide
  modified_base (4)..(4): 2'-fluoro-nucleotide
  modified_base (5)..(5): 2'-OMe-nucleotide
  modified_base (6)..(6): 2'-fluoro-nucleotide
  modified_base (7)..(7): 2'-OMe-nucleotide
  modified_base (8)..(8): 2'-fluoro-nucleotide
  modified_base (9)..(9): 2'-OMe-nucleotide
  modified_base (10)..(10): 2'-fluoro-nucleotide
  modified_base (11)..(11): 2'-OMe-nucleotide
  modified_base (12)..(12): 2'-fluoro-nucleotide
  modified_base (13)..(13): 2'-OMe-nucleotide
  modified_base (14)..(14): 2'-fluoro-nucleotide
  modified_base (15)..(15): 2'-OMe-nucleotide
  modified_base (16)..(16): 2'-fluoro-nucleotide
  modified_base (17)..(17): 2'-OMe-nucleotide
  modified_base (18)..(18): 2'-fluoro-nucleotide
  modified_base (19)..(19): 2'-OMe-nucleotide
  modified_base (20)..(20): dT
  modified_base (21)..(21): dT
aaugggauccuccgaugcctt

SEQ ID NO: 1053 - DNA, 21 bp, Artificial Sequence
  source: /note="Description of Artificial Sequence: Synthetic oligonucleotide"
  source: /note="Description of Combined DNA/RNA Molecule: Synthetic oligonucleotide"
  modified_base (1)..(1): 2'-fluoro-nucleotide
  modified_base (2)..(2): 2'-fluoro-nucleotide
  modified_base (3)..(3): 2'-OMe-nucleotide
  modified_base (4)..(4): 2'-fluoro-nucleotide
  modified_base (5)..(5): 2'-OMe-nucleotide
  modified_base (6)..(6): 2'-fluoro-nucleotide
  modified_base (7)..(7): 2'-OMe-nucleotide
  modified_base (8)..(8): 2'-fluoro-nucleotide
  modified_base (9)..(9): 2'-OMe-nucleotide
  modified_base (10)..(10): 2'-fluoro-nucleotide
  modified_base (11)..(11): 2'-OMe-nucleotide
  modified_base (12)..(12): 2'-fluoro-nucleotide
  modified_base (13)..(13): 2'-OMe-nucleotide
  modified_base (14)..(14): 2'-fluoro-nucleotide
  modified_base (15)..(15): 2'-OMe-nucleotide
  modified_base (16)..(16): 2'-fluoro-nucleotide
  modified_base (17)..(17): 2'-OMe-nucleotide
  modified_base (18)..(18): 2'-fluoro-nucleotide
  modified_base (19)..(19): 2'-OMe-nucleotide
  modified_base (20)..(20): dT
  modified_base (21)..(21): dT
acaucgugucagguugcagtt

SEQ ID NO: 1054 - DNA, 21 bp, Artificial Sequence
  source: /note="Description of Artificial Sequence: Synthetic oligonucleotide"
  source: /note="Description of Combined DNA/RNA Molecule: Synthetic oligonucleotide"
  modified_base (1)..(1): 2'-fluoro-nucleotide
  modified_base (2)..(2): 2'-fluoro-nucleotide
  modified_base (3)..(3): 2'-OMe-nucleotide
  modified_base (4)..(4): 2'-fluoro-nucleotide
  modified_base (5)..(5): 2'-OMe-nucleotide
  modified_base (6)..(6): 2'-fluoro-nucleotide
  modified_base (7)..(7): 2'-OMe-nucleotide
  modified_base (8)..(8): 2'-fluoro-nucleotide
  modified_base (9)..(9): 2'-OMe-nucleotide
  modified_base (10)..(10): 2'-fluoro-nucleotide
  modified_base (11)..(11): 2'-OMe-nucleotide
  modified_base (12)..(12): 2'-fluoro-nucleotide
  modified_base (13)..(13): 2'-OMe-nucleotide
  modified_base (14)..(14): 2'-fluoro-nucleotide
  modified_base (15)..(15): 2'-OMe-nucleotide
  modified_base (16)..(16): 2'-fluoro-nucleotide
  modified_base (17)..(17): 2'-OMe-nucleotide
  modified_base (18)..(18): 2'-fluoro-nucleotide
  modified_base (19)..(19): 2'-OMe-nucleotide
  modified_base (20)..(20): dT
  modified_base (21)..(21): dT
gacaucgugucagguugcatt

SEQ ID NO: 1055 - DNA, 21 bp, Artificial Sequence
  source: /note="Description of Artificial Sequence: Synthetic oligonucleotide"
  source: /note="Description of Combined DNA/RNA Molecule: Synthetic oligonucleotide"
  modified_base (1)..(1): 2'-fluoro-nucleotide
  modified_base (2)..(2): 2'-fluoro-nucleotide
  modified_base (3)..(3): 2'-OMe-nucleotide
  modified_base (4)..(4): 2'-fluoro-nucleotide
  modified_base (5)..(5): 2'-OMe-nucleotide
  modified_base (6)..(6): 2'-fluoro-nucleotide
  modified_base (7)..(7): 2'-OMe-nucleotide
  modified_base (8)..(8): 2'-fluoro-nucleotide
  modified_base (9)..(9): 2'-OMe-nucleotide
  modified_base (10)..(10): 2'-fluoro-nucleotide
  modified_base (11)..(11): 2'-OMe-nucleotide
  modified_base (12)..(12): 2'-fluoro-nucleotide
  modified_base (13)..(13): 2'-OMe-nucleotide
  modified_base (14)..(14): 2'-fluoro-nucleotide
  modified_base (15)..(15): 2'-OMe-nucleotide
  modified_base (16)..(16): 2'-fluoro-nucleotide
  modified_base (17)..(17): 2'-OMe-nucleotide
  modified_base (18)..(18): 2'-fluoro-nucleotide
  modified_base (19)..(19): 2'-OMe-nucleotide
  modified_base (20)..(20): dT
  modified_base (21)..(21): dT
ggacaucgugucagguugctt

SEQ ID NO: 1056 - DNA, 21 bp, Artificial Sequence
  source: /note="Description of Artificial Sequence: Synthetic oligonucleotide"
  source: /note="Description of Combined DNA/RNA Molecule: Synthetic oligonucleotide"
  modified_base (1)..(1): 2'-fluoro-nucleotide
  modified_base (2)..(2): 2'-fluoro-nucleotide
  modified_base (3)..(3): 2'-OMe-nucleotide
  modified_base (4)..(4): 2'-fluoro-nucleotide
  modified_base (5)..(5): 2'-OMe-nucleotide
  modified_base (6)..(6): 2'-fluoro-nucleotide
  modified_base (7)..(7): 2'-OMe-nucleotide
  modified_base (8)..(8): 2'-fluoro-nucleotide
  modified_base (9)..(9): 2'-OMe-nucleotide
  modified_base (10)..(10): 2'-fluoro-nucleotide
  modified_base (11)..(11): 2'-OMe-nucleotide
  modified_base (12)..(12): 2'-fluoro-nucleotide
  modified_base (13)..(13): 2'-OMe-nucleotide
  modified_base (14)..(14): 2'-fluoro-nucleotide
  modified_base (15)..(15): 2'-OMe-nucleotide
  modified_base (16)..(16): 2'-fluoro-nucleotide
  modified_base (17)..(17): 2'-OMe-nucleotide
  modified_base (18)..(18): 2'-fluoro-nucleotide
  modified_base (19)..(19): 2'-OMe-nucleotide
  modified_base (20)..(20): dT
  modified_base (21)..(21): dT
uggacaucgugucagguugtt

SEQ ID NO: 1057 - DNA, 21 bp, Artificial Sequence
  source: /note="Description of Artificial Sequence: Synthetic oligonucleotide"
  source: /note="Description of Combined DNA/RNA Molecule: Synthetic oligonucleotide"
  modified_base (1)..(1): 2'-fluoro-nucleotide
  modified_base (2)..(2): 2'-fluoro-nucleotide
  modified_base (3)..(3): 2'-OMe-nucleotide
  modified_base (4)..(4): 2'-fluoro-nucleotide
  modified_base (5)..(5): 2'-OMe-nucleotide
  modified_base (6)..(6): 2'-fluoro-nucleotide
  modified_base (7)..(7): 2'-OMe-nucleotide
  modified_base (8)..(8): 2'-fluoro-nucleotide
  modified_base (9)..(9): 2'-OMe-nucleotide
  modified_base (10)..(10): 2'-fluoro-nucleotide
  modified_base (11)..(11): 2'-OMe-nucleotide
  modified_base (12)..(12): 2'-fluoro-nucleotide
  modified_base (13)..(13): 2'-OMe-nucleotide
  modified_base (14)..(14): 2'-fluoro-nucleotide
  modified_base (15)..(15): 2'-OMe-nucleotide
  modified_base (16)..(16): 2'-fluoro-nucleotide
  modified_base (17)..(17): 2'-OMe-nucleotide
  modified_base (18)..(18): 2'-fluoro-nucleotide
  modified_base (19)..(19): 2'-OMe-nucleotide
  modified_base (20)..(20): dT
  modified_base (21)..(21): dT
cuggacaucgugucagguutt

SEQ ID NO: 1058 - DNA, 21 bp, Artificial Sequence
  source: /note="Description of Artificial Sequence: Synthetic oligonucleotide"
  source: /note="Description of Combined DNA/RNA Molecule: Synthetic oligonucleotide"
  modified_base (1)..(1): 2'-fluoro-nucleotide
  modified_base (2)..(2): 2'-fluoro-nucleotide
  modified_base (3)..(3): 2'-OMe-nucleotide
  modified_base (4)..(4): 2'-fluoro-nucleotide
  modified_base (5)..(5): 2'-OMe-nucleotide
  modified_base (6)..(6): 2'-fluoro-nucleotide
  modified_base (7)..(7): 2'-OMe-nucleotide
  modified_base (8)..(8): 2'-fluoro-nucleotide
  modified_base (9)..(9): 2'-OMe-nucleotide
  modified_base (10)..(10): 2'-fluoro-nucleotide
  modified_base (11)..(11): 2'-OMe-nucleotide
  modified_base (12)..(12): 2'-fluoro-nucleotide
  modified_base (13)..(13): 2'-OMe-nucleotide
  modified_base (14)..(14): 2'-fluoro-nucleotide
  modified_base (15)..(15): 2'-OMe-nucleotide
  modified_base (16)..(16): 2'-fluoro-nucleotide
  modified_base (17)..(17): 2'-OMe-nucleotide
  modified_base (18)..(18): 2'-fluoro-nucleotide
  modified_base (19)..(19): 2'-OMe-nucleotide
  modified_base (20)..(20): dT
  modified_base (21)..(21): dT
cacuggacaucgugucaggtt

SEQ ID NO: 1059 - DNA, 21 bp, Artificial Sequence
  source: /note="Description of Artificial Sequence: Synthetic oligonucleotide"
  source: /note="Description of Combined DNA/RNA Molecule: Synthetic oligonucleotide"
  modified_base (1)..(1): 2'-fluoro-nucleotide
  modified_base (2)..(2): 2'-fluoro-nucleotide
  modified_base (3)..(3): 2'-OMe-nucleotide
  modified_base (4)..(4): 2'-fluoro-nucleotide
  modified_base (5)..(5): 2'-OMe-nucleotide
  modified_base (6)..(6): 2'-fluoro-nucleotide
  modified_base (7)..(7): 2'-OMe-nucleotide
  modified_base (8)..(8): 2'-fluoro-nucleotide
  modified_base (9)..(9): 2'-OMe-nucleotide
  modified_base (10)..(10): 2'-fluoro-nucleotide
  modified_base (11)..(11): 2'-OMe-nucleotide
  modified_base (12)..(12): 2'-fluoro-nucleotide
  modified_base (13)..(13): 2'-OMe-nucleotide
  modified_base (14)..(14): 2'-fluoro-nucleotide
  modified_base (15)..(15): 2'-OMe-nucleotide
  modified_base (16)..(16): 2'-fluoro-nucleotide
  modified_base (17)..(17): 2'-OMe-nucleotide
  modified_base (18)..(18): 2'-fluoro-nucleotide
  modified_base (19)..(19): 2'-OMe-nucleotide
  modified_base (20)..(20): dT
  modified_base (21)..(21): dT
ucacuggacaucgugucagtt

SEQ ID NO: 1060 - DNA, 21 bp, Artificial Sequence
  source: /note="Description of Artificial Sequence: Synthetic oligonucleotide"
  source: /note="Description of Combined DNA/RNA Molecule: Synthetic oligonucleotide"
  modified_base (1)..(1): 2'-fluoro-nucleotide
  modified_base (2)..(2): 2'-fluoro-nucleotide
  modified_base (3)..(3): 2'-OMe-nucleotide
  modified_base (4)..(4): 2'-fluoro-nucleotide
  modified_base (5)..(5): 2'-OMe-nucleotide
  modified_base (6)..(6): 2'-fluoro-nucleotide
  modified_base (7)..(7): 2'-OMe-nucleotide
  modified_base (8)..(8): 2'-fluoro-nucleotide
  modified_base (9)..(9): 2'-OMe-nucleotide
  modified_base (10)..(10): 2'-fluoro-nucleotide
  modified_base (11)..(11): 2'-OMe-nucleotide
  modified_base (12)..(12): 2'-fluoro-nucleotide
  modified_base (13)..(13): 2'-OMe-nucleotide
  modified_base (14)..(14): 2'-fluoro-nucleotide
  modified_base (15)..(15): 2'-OMe-nucleotide
  modified_base (16)..(16): 2'-fluoro-nucleotide
  modified_base (17)..(17): 2'-OMe-nucleotide
  modified_base (18)..(18): 2'-fluoro-nucleotide
  modified_base (19)..(19): 2'-OMe-nucleotide
  modified_base (20)..(20): dT
  modified_base (21)..(21): dT
gucacuggacaucgugucatt

SEQ ID NO: 1061 - DNA, 21 bp, Artificial Sequence
  source: /note="Description of Artificial Sequence: Synthetic oligonucleotide"
  source: /note="Description of Combined DNA/RNA Molecule: Synthetic oligonucleotide"
  modified_base (1)..(1): 2'-fluoro-nucleotide
  modified_base (2)..(2): 2'-fluoro-nucleotide
  modified_base (3)..(3): 2'-OMe-nucleotide
  modified_base (4)..(4): 2'-fluoro-nucleotide
  modified_base (5)..(5): 2'-OMe-nucleotide
  modified_base (6)..(6): 2'-fluoro-nucleotide
  modified_base (7)..(7): 2'-OMe-nucleotide
  modified_base (8)..(8): 2'-fluoro-nucleotide
  modified_base (9)..(9): 2'-OMe-nucleotide
  modified_base (10)..(10): 2'-fluoro-nucleotide
  modified_base (11)..(11): 2'-OMe-nucleotide
  modified_base (12)..(12): 2'-fluoro-nucleotide
  modified_base (13)..(13): 2'-OMe-nucleotide
  modified_base (14)..(14): 2'-fluoro-nucleotide
  modified_base (15)..(15): 2'-OMe-nucleotide
  modified_base (16)..(16): 2'-fluoro-nucleotide
  modified_base (17)..(17): 2'-OMe-nucleotide
  modified_base (18)..(18): 2'-fluoro-nucleotide
  modified_base (19)..(19): 2'-OMe-nucleotide
  modified_base (20)..(20): dT
  modified_base (21)..(21): dT
ugucacuggacaucguguctt

SEQ ID NO: 1062 - DNA, 21 bp, Artificial Sequence
  source: /note="Description of Artificial Sequence: Synthetic oligonucleotide"
  source: /note="Description of Combined DNA/RNA Molecule: Synthetic oligonucleotide"
  modified_base (1)..(1): 2'-fluoro-nucleotide
  modified_base (2)..(2): 2'-fluoro-nucleotide
  modified_base (3)..(3): 2'-OMe-nucleotide
  modified_base (4)..(4): 2'-fluoro-nucleotide
  modified_base (5)..(5): 2'-OMe-nucleotide
  modified_base (6)..(6): 2'-fluoro-nucleotide
  modified_base (7)..(7): 2'-OMe-nucleotide
  modified_base (8)..(8): 2'-fluoro-nucleotide
  modified_base (9)..(9): 2'-OMe-nucleotide
  modified_base (10)..(10): 2'-fluoro-nucleotide
  modified_base (11)..(11): 2'-OMe-nucleotide
  modified_base (12)..(12): 2'-fluoro-nucleotide
  modified_base (13)..(13): 2'-OMe-nucleotide
  modified_base (14)..(14): 2'-fluoro-nucleotide
  modified_base (15)..(15): 2'-OMe-nucleotide
  modified_base (16)..(16): 2'-fluoro-nucleotide
  modified_base (17)..(17): 2'-OMe-nucleotide
  modified_base (18)..(18): 2'-fluoro-nucleotide
  modified_base (19)..(19): 2'-OMe-nucleotide
  modified_base (20)..(20): dT
  modified_base (21)..(21): dT
cugucacuggacaucgugutt

SEQ ID NO: 1063 - DNA, 21 bp, Artificial Sequence
  source: /note="Description of Artificial Sequence: Synthetic oligonucleotide"
  source: /note="Description of Combined DNA/RNA Molecule: Synthetic oligonucleotide"
  modified_base (1)..(1): 2'-fluoro-nucleotide
  modified_base (2)..(2): 2'-fluoro-nucleotide
  modified_base (3)..(3): 2'-OMe-nucleotide
  modified_base (4)..(4): 2'-fluoro-nucleotide
  modified_base (5)..(5): 2'-OMe-nucleotide
  modified_base (6)..(6): 2'-fluoro-nucleotide
  modified_base (7)..(7): 2'-OMe-nucleotide
  modified_base (8)..(8): 2'-fluoro-nucleotide
  modified_base (9)..(9): 2'-OMe-nucleotide
  modified_base (10)..(10): 2'-fluoro-nucleotide
  modified_base (11)..(11): 2'-OMe-nucleotide
  modified_base (12)..(12): 2'-fluoro-nucleotide
  modified_base (13)..(13): 2'-OMe-nucleotide
  modified_base (14)..(14): 2'-fluoro-nucleotide
  modified_base (15)..(15): 2'-OMe-nucleotide
  modified_base (16)..(16): 2'-fluoro-nucleotide
  modified_base (17)..(17): 2'-OMe-nucleotide
  modified_base (18)..(18): 2'-fluoro-nucleotide
  modified_base (19)..(19): 2'-OMe-nucleotide
  modified_base (20)..(20): dT
  modified_base (21)..(21): dT
auucugucacuggacaucgtt

SEQ ID NO: 1064 - DNA, 21 bp, Artificial Sequence
  source: /note="Description of Artificial Sequence: Synthetic oligonucleotide"
  source: /note="Description of Combined DNA/RNA Molecule: Synthetic oligonucleotide"
  modified_base (1)..(1): 2'-fluoro-nucleotide
  modified_base (2)..(2): 2'-fluoro-nucleotide
  modified_base (3)..(3): 2'-OMe-nucleotide
  modified_base (4)..(4): 2'-fluoro-nucleotide
  modified_base (5)..(5): 2'-OMe-nucleotide
  modified_base (6)..(6): 2'-fluoro-nucleotide
  modified_base (7)..(7): 2'-OMe-nucleotide
  modified_base (8)..(8): 2'-fluoro-nucleotide
  modified_base (9)..(9): 2'-OMe-nucleotide
  modified_base (10)..(10): 2'-fluoro-nucleotide
  modified_base (11)..(11): 2'-OMe-nucleotide
  modified_base (12)..(12): 2'-fluoro-nucleotide
  modified_base (13)..(13): 2'-OMe-nucleotide
  modified_base (14)..(14): 2'-fluoro-nucleotide
  modified_base (15)..(15): 2'-OMe-nucleotide
  modified_base (16)..(16): 2'-fluoro-nucleotide
  modified_base (17)..(17): 2'-OMe-nucleotide
  modified_base (18)..(18): 2'-fluoro-nucleotide
  modified_base (19)..(19): 2'-OMe-nucleotide
  modified_base (20)..(20): dT
  modified_base (21)..(21): dT
cgauaacuccguccaucactt

SEQ ID NO: 1065 - DNA, 21 bp, Artificial Sequence
  source: /note="Description of Artificial Sequence: Synthetic oligonucleotide"
  source: /note="Description of Combined DNA/RNA Molecule: Synthetic oligonucleotide"
  modified_base (1)..(1): 2'-fluoro-nucleotide
  modified_base (2)..(2): 2'-fluoro-nucleotide
  modified_base (3)..(3): 2'-OMe-nucleotide
  modified_base (4)..(4): 2'-fluoro-nucleotide
  modified_base (5)..(5): 2'-OMe-nucleotide
  modified_base (6)..(6): 2'-fluoro-nucleotide
  modified_base (7)..(7): 2'-OMe-nucleotide
  modified_base (8)..(8): 2'-fluoro-nucleotide
  modified_base (9)..(9): 2'-OMe-nucleotide
  modified_base (10)..(10): 2'-fluoro-nucleotide
  modified_base (11)..(11): 2'-OMe-nucleotide
  modified_base (12)..(12): 2'-fluoro-nucleotide
  modified_base (13)..(13): 2'-OMe-nucleotide
  modified_base (14)..(14): 2'-fluoro-nucleotide
  modified_base (15)..(15): 2'-OMe-nucleotide
  modified_base (16)..(16): 2'-fluoro-nucleotide
  modified_base (17)..(17): 2'-OMe-nucleotide
  modified_base (18)..(18): 2'-fluoro-nucleotide
  modified_base (19)..(19): 2'-OMe-nucleotide
  modified_base (20)..(20): dT
  modified_base (21)..(21): dT
ucgauaacuccguccaucatt

SEQ ID NO: 1066 - DNA, 21 bp, Artificial Sequence
  source: /note="Description of Artificial Sequence: Synthetic oligonucleotide"
  source: /note="Description of Combined DNA/RNA Molecule: Synthetic oligonucleotide"
  modified_base (1)..(1): 2'-fluoro-nucleotide
  modified_base (2)..(2): 2'-fluoro-nucleotide
  modified_base (3)..(3): 2'-OMe-nucleotide
  modified_base (4)..(4): 2'-fluoro-nucleotide
  modified_base (5)..(5): 2'-OMe-nucleotide
  modified_base (6)..(6): 2'-fluoro-nucleotide
  modified_base (7)..(7): 2'-OMe-nucleotide
  modified_base (8)..(8): 2'-fluoro-nucleotide
  modified_base (9)..(9): 2'-OMe-nucleotide
  modified_base (10)..(10): 2'-fluoro-nucleotide
  modified_base (11)..(11): 2'-OMe-nucleotide
  modified_base (12)..(12): 2'-fluoro-nucleotide
  modified_base (13)..(13): 2'-OMe-nucleotide
  modified_base (14)..(14): 2'-fluoro-nucleotide
  modified_base (15)..(15): 2'-OMe-nucleotide
  modified_base (16)..(16): 2'-fluoro-nucleotide
  modified_base (17)..(17): 2'-OMe-nucleotide
  modified_base (18)..(18): 2'-fluoro-nucleotide
  modified_base (19)..(19): 2'-OMe-nucleotide
  modified_base (20)..(20): dT
  modified_base (21)..(21): dT
cucgauaacuccguccauctt

SEQ ID NO: 1067 - DNA, 21 bp, Artificial Sequence
  source: /note="Description of Artificial Sequence: Synthetic oligonucleotide"
  source: /note="Description of Combined DNA/RNA Molecule: Synthetic oligonucleotide"
  modified_base (1)..(1): 2'-fluoro-nucleotide
  modified_base (2)..(2): 2'-fluoro-nucleotide
  modified_base (3)..(3): 2'-OMe-nucleotide
  modified_base (4)..(4): 2'-fluoro-nucleotide
  modified_base (5)..(5): 2'-OMe-nucleotide
  modified_base (6)..(6): 2'-fluoro-nucleotide
  modified_base (7)..(7): 2'-OMe-nucleotide
  modified_base (8)..(8): 2'-fluoro-nucleotide
  modified_base (9)..(9): 2'-OMe-nucleotide
  modified_base (10)..(10): 2'-fluoro-nucleotide
  modified_base (11)..(11): 2'-OMe-nucleotide
  modified_base (12)..(12): 2'-fluoro-nucleotide
  modified_base (13)..(13): 2'-OMe-nucleotide
  modified_base (14)..(14): 2'-fluoro-nucleotide
  modified_base (15)..(15): 2'-OMe-nucleotide
  modified_base (16)..(16): 2'-fluoro-nucleotide
  modified_base (17)..(17): 2'-OMe-nucleotide
  modified_base (18)..(18): 2'-fluoro-nucleotide
  modified_base (19)..(19): 2'-OMe-nucleotide
  modified_base (20)..(20): dT
  modified_base (21)..(21): dT
ccucgauaacuccguccautt

SEQ ID NO: 1068 - DNA, 21 bp, Artificial Sequence
  source: /note="Description of Artificial Sequence: Synthetic oligonucleotide"
  source: /note="Description of Combined DNA/RNA Molecule: Synthetic oligonucleotide"
  modified_base (1)..(1): 2'-fluoro-nucleotide
  modified_base (2)..(2): 2'-fluoro-nucleotide
  modified_base (3)..(3): 2'-OMe-nucleotide
  modified_base (4)..(4): 2'-fluoro-nucleotide
  modified_base (5)..(5): 2'-OMe-nucleotide
  modified_base (6)..(6): 2'-fluoro-nucleotide
  modified_base (7)..(7): 2'-OMe-nucleotide
  modified_base (8)..(8): 2'-fluoro-nucleotide
  modified_base (9)..(9): 2'-OMe-nucleotide
  modified_base (10)..(10): 2'-fluoro-nucleotide
  modified_base (11)..(11): 2'-OMe-nucleotide
  modified_base (12)..(12): 2'-fluoro-nucleotide
  modified_base (13)..(13): 2'-OMe-nucleotide
  modified_base (14)..(14): 2'-fluoro-nucleotide
  modified_base (15)..(15): 2'-OMe-nucleotide
  modified_base (16)..(16): 2'-fluoro-nucleotide
  modified_base (17)..(17): 2'-OMe-nucleotide
  modified_base (18)..(18): 2'-fluoro-nucleotide
  modified_base (19)..(19): 2'-OMe-nucleotide
  modified_base (20)..(20): dT
  modified_base (21)..(21): dT
gccucgauaacuccguccatt

SEQ ID NO: 1069 - DNA, 21 bp, Artificial Sequence
  source: /note="Description of Artificial Sequence: Synthetic oligonucleotide"
  source: /note="Description of Combined DNA/RNA Molecule: Synthetic oligonucleotide"
  modified_base (1)..(1): 2'-fluoro-nucleotide
  modified_base (2)..(2): 2'-fluoro-nucleotide
  modified_base (3)..(3): 2'-OMe-nucleotide
  modified_base (4)..(4): 2'-fluoro-nucleotide
  modified_base (5)..(5): 2'-OMe-nucleotide
  modified_base (6)..(6): 2'-fluoro-nucleotide
  modified_base (7)..(7): 2'-OMe-nucleotide
  modified_base (8)..(8): 2'-fluoro-nucleotide
  modified_base (9)..(9): 2'-OMe-nucleotide
  modified_base (10)..(10): 2'-fluoro-nucleotide
  modified_base (11)..(11): 2'-OMe-nucleotide
  modified_base (12)..(12): 2'-fluoro-nucleotide
  modified_base (13)..(13): 2'-OMe-nucleotide
  modified_base (14)..(14): 2'-fluoro-nucleotide
  modified_base (15)..(15): 2'-OMe-nucleotide
  modified_base (16)..(16): 2'-fluoro-nucleotide
  modified_base (17)..(17): 2'-OMe-nucleotide
  modified_base (18)..(18): 2'-fluoro-nucleotide
  modified_base (19)..(19): 2'-OMe-nucleotide
  modified_base (20)..(20): dT
  modified_base (21)..(21): dT
ugccucgauaacuccgucctt

SEQ ID NO: 1070 - DNA, 21 bp, Artificial Sequence
  source: /note="Description of Artificial Sequence: Synthetic oligonucleotide"
  source: /note="Description of Combined DNA/RNA Molecule: Synthetic oligonucleotide"
  modified_base (1)..(1): 2'-fluoro-nucleotide
  modified_base (2)..(2): 2'-fluoro-nucleotide
  modified_base (3)..(3): 2'-OMe-nucleotide
  modified_base (4)..(4): 2'-fluoro-nucleotide
  modified_base (5)..(5): 2'-OMe-nucleotide
  modified_base (6)..(6): 2'-fluoro-nucleotide
  modified_base (7)..(7): 2'-OMe-nucleotide
  modified_base (8)..(8): 2'-fluoro-nucleotide
  modified_base (9)..(9): 2'-OMe-nucleotide
  modified_base (10)..(10): 2'-fluoro-nucleotide
  modified_base (11)..(11): 2'-OMe-nucleotide
  modified_base (12)..(12): 2'-fluoro-nucleotide
  modified_base (13)..(13): 2'-OMe-nucleotide
  modified_base (14)..(14): 2'-fluoro-nucleotide
  modified_base (15)..(15): 2'-OMe-nucleotide
  modified_base (16)..(16): 2'-fluoro-nucleotide
  modified_base (17)..(17): 2'-OMe-nucleotide
  modified_base (18)..(18): 2'-fluoro-nucleotide
  modified_base (19)..(19): 2'-OMe-nucleotide
  modified_base (20)..(20): dT
  modified_base (21)..(21): dT
ggauaugccucgauaacuctt

SEQ ID NO: 1071 - DNA, 21 bp, Artificial Sequence
  source: /note="Description of Artificial Sequence: Synthetic oligonucleotide"
  source: /note="Description of Combined DNA/RNA Molecule: Synthetic oligonucleotide"
  modified_base (1)..(1): 2'-fluoro-nucleotide
  modified_base (2)..(2): 2'-fluoro-nucleotide
  modified_base (3)..(3): 2'-OMe-nucleotide
  modified_base (4)..(4): 2'-fluoro-nucleotide
  modified_base (5)..(5): 2'-OMe-nucleotide
  modified_base (6)..(6): 2'-fluoro-nucleotide
  modified_base (7)..(7): 2'-OMe-nucleotide
  modified_base (8)..(8): 2'-fluoro-nucleotide
  modified_base (9)..(9): 2'-OMe-nucleotide
  modified_base (10)..(10): 2'-fluoro-nucleotide
  modified_base (11)..(11): 2'-OMe-nucleotide
  modified_base (12)..(12): 2'-fluoro-nucleotide
  modified_base (13)..(13): 2'-OMe-nucleotide
  modified_base (14)..(14): 2'-fluoro-nucleotide
  modified_base (15)..(15): 2'-OMe-nucleotide
  modified_base (16)..(16): 2'-fluoro-nucleotide
  modified_base (17)..(17): 2'-OMe-nucleotide
  modified_base (18)..(18): 2'-fluoro-nucleotide
  modified_base (19)..(19): 2'-OMe-nucleotide
  modified_base (20)..(20): dT
  modified_base (21)..(21): dT
aggauaugccucgauaacutt

SEQ ID NO: 1072 - DNA, 21 bp, Artificial Sequence
  source: /note="Description of Artificial Sequence: Synthetic oligonucleotide"
  source: /note="Description of Combined DNA/RNA Molecule: Synthetic oligonucleotide"
  modified_base (1)..(1): 2'-fluoro-nucleotide
  modified_base (2)..(2): 2'-fluoro-nucleotide
  modified_base (3)..(3): 2'-OMe-nucleotide
  modified_base (4)..(4): 2'-fluoro-nucleotide
  modified_base (5)..(5): 2'-OMe-nucleotide
  modified_base (6)..(6): 2'-fluoro-nucleotide
  modified_base (7)..(7): 2'-OMe-nucleotide
  modified_base (8)..(8): 2'-fluoro-nucleotide
  modified_base (9)..(9): 2'-OMe-nucleotide
  modified_base (10)..(10): 2'-fluoro-nucleotide
  modified_base (11)..(11): 2'-OMe-nucleotide
  modified_base (12)..(12): 2'-fluoro-nucleotide
  modified_base (13)..(13): 2'-OMe-nucleotide
  modified_base (14)..(14): 2'-fluoro-nucleotide
  modified_base (15)..(15): 2'-OMe-nucleotide
  modified_base (16)..(16): 2'-fluoro-nucleotide
  modified_base (17)..(17): 2'-OMe-nucleotide
  modified_base (18)..(18): 2'-fluoro-nucleotide
  modified_base (19)..(19): 2'-OMe-nucleotide
  modified_base (20)..(20): dT
  modified_base (21)..(21): dT
gaggauaugccucgauaactt

SEQ ID NO: 1073 - DNA, 21 bp, Artificial Sequence
  source: /note="Description of Artificial Sequence: Synthetic oligonucleotide"
  source: /note="Description of Combined DNA/RNA Molecule: Synthetic oligonucleotide"
  modified_base (1)..(1): 2'-fluoro-nucleotide
  modified_base (2)..(2): 2'-fluoro-nucleotide
  modified_base (3)..(3): 2'-OMe-nucleotide
  modified_base (4)..(4): 2'-fluoro-nucleotide
  modified_base (5)..(5): 2'-OMe-nucleotide
  modified_base (6)..(6): 2'-fluoro-nucleotide
  modified_base (7)..(7): 2'-OMe-nucleotide
  modified_base (8)..(8): 2'-fluoro-nucleotide
  modified_base (9)..(9): 2'-OMe-nucleotide
  modified_base (10)..(10): 2'-fluoro-nucleotide
  modified_base (11)..(11): 2'-OMe-nucleotide
  modified_base (12)..(12): 2'-fluoro-nucleotide
  modified_base (13)..(13): 2'-OMe-nucleotide
  modified_base (14)..(14): 2'-fluoro-nucleotide
  modified_base (15)..(15): 2'-OMe-nucleotide
  modified_base (16)..(16): 2'-fluoro-nucleotide
  modified_base (17)..(17): 2'-OMe-nucleotide
  modified_base (18)..(18): 2'-fluoro-nucleotide
  modified_base (19)..(19): 2'-OMe-nucleotide
  modified_base (20)..(20): dT
  modified_base (21)..(21): dT
ggaggauaugccucgauaatt

SEQ ID NO: 1074 - DNA, 21 bp, Artificial Sequence
  source: /note="Description of Artificial Sequence: Synthetic oligonucleotide"
  source: /note="Description of Combined DNA/RNA Molecule: Synthetic oligonucleotide"
  modified_base (1)..(1): 2'-fluoro-nucleotide
  modified_base (2)..(2): 2'-fluoro-nucleotide
  modified_base (3)..(3): 2'-OMe-nucleotide
  modified_base (4)..(4): 2'-fluoro-nucleotide
  modified_base (5)..(5): 2'-OMe-nucleotide
  modified_base (6)..(6): 2'-fluoro-nucleotide
  modified_base (7)..(7): 2'-OMe-nucleotide
  modified_base (8)..(8): 2'-fluoro-nucleotide
  modified_base (9)..(9): 2'-OMe-nucleotide
  modified_base (10)..(10): 2'-fluoro-nucleotide
  modified_base (11)..(11): 2'-OMe-nucleotide
  modified_base (12)..(12): 2'-fluoro-nucleotide
  modified_base (13)..(13): 2'-OMe-nucleotide
  modified_base (14)..(14): 2'-fluoro-nucleotide
  modified_base (15)..(15): 2'-OMe-nucleotide
  modified_base (16)..(16): 2'-fluoro-nucleotide
  modified_base (17)..(17): 2'-OMe-nucleotide
  modified_base (18)..(18): 2'-fluoro-nucleotide
  modified_base (19)..(19): 2'-OMe-nucleotide
  modified_base (20)..(20): dT
  modified_base (21)..(21): dT
aagauugacagguccuucctt

SEQ ID NO: 1075 - DNA, 21 bp, Artificial Sequence
  source: /note="Description of Artificial Sequence: Synthetic oligonucleotide"
  source: /note="Description of Combined DNA/RNA Molecule: Synthetic oligonucleotide"
  modified_base (1)..(1): 2'-fluoro-nucleotide
  modified_base (2)..(2): 2'-fluoro-nucleotide
  modified_base (3)..(3): 2'-OMe-nucleotide
  modified_base (4)..(4): 2'-fluoro-nucleotide
  modified_base (5)..(5): 2'-OMe-nucleotide
  modified_base (6)..(6): 2'-fluoro-nucleotide
  modified_base (7)..(7): 2'-OMe-nucleotide
  modified_base (8)..(8): 2'-fluoro-nucleotide
  modified_base (9)..(9): 2'-OMe-nucleotide
  modified_base (10)..(10): 2'-fluoro-nucleotide
  modified_base (11)..(11): 2'-OMe-nucleotide
  modified_base (12)..(12): 2'-fluoro-nucleotide
  modified_base (13)..(13): 2'-OMe-nucleotide
  modified_base (14)..(14): 2'-fluoro-nucleotide
  modified_base (15)..(15): 2'-OMe-nucleotide
  modified_base (16)..(16): 2'-fluoro-nucleotide
  modified_base (17)..(17): 2'-OMe-nucleotide
  modified_base (18)..(18): 2'-fluoro-nucleotide
  modified_base (19)..(19): 2'-OMe-nucleotide
  modified_base (20)..(20): dT
  modified_base (21)..(21): dT
ccaagauugacagguccuutt

SEQ ID NO: 1076 - DNA, 21 bp, Artificial Sequence
  source: /note="Description of Artificial Sequence: Synthetic oligonucleotide"
  source: /note="Description of Combined DNA/RNA Molecule: Synthetic oligonucleotide"
  modified_base (1)..(1): 2'-fluoro-nucleotide
  modified_base (2)..(2): 2'-fluoro-nucleotide
  modified_base (3)..(3): 2'-OMe-nucleotide
  modified_base (4)..(4): 2'-fluoro-nucleotide
  modified_base (5)..(5): 2'-OMe-nucleotide
  modified_base (6)..(6): 2'-fluoro-nucleotide
  modified_base (7)..(7): 2'-OMe-nucleotide
  modified_base (8)..(8): 2'-fluoro-nucleotide
  modified_base (9)..(9): 2'-OMe-nucleotide
  modified_base (10)..(10): 2'-fluoro-nucleotide
  modified_base (11)..(11): 2'-OMe-nucleotide
  modified_base (12)..(12): 2'-fluoro-nucleotide
  modified_base (13)..(13): 2'-OMe-nucleotide
  modified_base (14)..(14): 2'-fluoro-nucleotide
  modified_base (15)..(15): 2'-OMe-nucleotide
  modified_base (16)..(16): 2'-fluoro-nucleotide
  modified_base (17)..(17): 2'-OMe-nucleotide
  modified_base (18)..(18): 2'-fluoro-nucleotide
  modified_base (19)..(19): 2'-OMe-nucleotide
  modified_base (20)..(20): dT
  modified_base (21)..(21): dT
accaagauugacagguccutt

SEQ ID NO: 1077 - DNA, 21 bp, Artificial Sequence
  source: /note="Description of Artificial Sequence: Synthetic oligonucleotide"
  source: /note="Description of Combined DNA/RNA Molecule: Synthetic oligonucleotide"
  modified_base (1)..(1): 2'-fluoro-nucleotide
  modified_base (2)..(2): 2'-fluoro-nucleotide
  modified_base (3)..(3): 2'-OMe-nucleotide
  modified_base (4)..(4): 2'-fluoro-nucleotide
  modified_base (5)..(5): 2'-OMe-nucleotide
  modified_base (6)..(6): 2'-fluoro-nucleotide
  modified_base (7)..(7): 2'-OMe-nucleotide
  modified_base (8)..(8): 2'-fluoro-nucleotide
  modified_base (9)..(9): 2'-OMe-nucleotide
  modified_base (10)..(10): 2'-fluoro-nucleotide
  modified_base (11)..(11): 2'-OMe-nucleotide
  modified_base (12)..(12): 2'-fluoro-nucleotide
  modified_base (13)..(13): 2'-OMe-nucleotide
  modified_base (14)..(14): 2'-fluoro-nucleotide
  modified_base (15)..(15): 2'-OMe-nucleotide
  modified_base (16)..(16): 2'-fluoro-nucleotide
  modified_base (17)..(17): 2'-OMe-nucleotide
  modified_base (18)..(18): 2'-fluoro-nucleotide
  modified_base (19)..(19): 2'-OMe-nucleotide
  modified_base (20)..(20): dT
  modified_base (21)..(21): dT
gaccaagauugacaggucctt

SEQ ID NO: 1078 - DNA, 21 bp, Artificial Sequence
  source: /note="Description of Artificial Sequence: Synthetic oligonucleotide"
  source: /note="Description of Combined DNA/RNA Molecule: Synthetic oligonucleotide"
  modified_base (1)..(1): 2'-fluoro-nucleotide
  modified_base (2)..(2): 2'-fluoro-nucleotide
  modified_base (3)..(3): 2'-OMe-nucleotide
  modified_base (4)..(4): 2'-fluoro-nucleotide
  modified_base (5)..(5): 2'-OMe-nucleotide
  modified_base (6)..(6): 2'-fluoro-nucleotide
  modified_base (7)..(7): 2'-OMe-nucleotide
  modified_base (8)..(8): 2'-fluoro-nucleotide
  modified_base (9)..(9): 2'-OMe-nucleotide
  modified_base (10)..(10): 2'-fluoro-nucleotide
  modified_base (11)..(11): 2'-OMe-nucleotide
  modified_base (12)..(12): 2'-fluoro-nucleotide
  modified_base (13)..(13): 2'-OMe-nucleotide
  modified_base (14)..(14): 2'-fluoro-nucleotide
  modified_base (15)..(15): 2'-OMe-nucleotide
  modified_base (16)..(16): 2'-fluoro-nucleotide
  modified_base (17)..(17): 2'-OMe-nucleotide
  modified_base (18)..(18): 2'-fluoro-nucleotide
  modified_base (19)..(19): 2'-OMe-nucleotide
  modified_base (20)..(20): dT
  modified_base (21)..(21): dT
aguaguucucggucaggcctt

SEQ ID NO: 1079 - DNA, 21 bp, Artificial Sequence
  source: /note="Description of Artificial Sequence: Synthetic oligonucleotide"
  source: /note="Description of Combined DNA/RNA Molecule: Synthetic oligonucleotide"
  modified_base (1)..(1): 2'-fluoro-nucleotide
  modified_base (2)..(2): 2'-fluoro-nucleotide
  modified_base (3)..(3): 2'-OMe-nucleotide
  modified_base (4)..(4): 2'-fluoro-nucleotide
  modified_base (5)..(5): 2'-OMe-nucleotide
  modified_base (6)..(6): 2'-fluoro-nucleotide
  modified_base (7)..(7): 2'-OMe-nucleotide
  modified_base (8)..(8): 2'-fluoro-nucleotide
  modified_base (9)..(9): 2'-OMe-nucleotide
  modified_base (10)..(10): 2'-fluoro-nucleotide
  modified_base (11)..(11): 2'-OMe-nucleotide
  modified_base (12)..(12): 2'-fluoro-nucleotide
  modified_base (13)..(13): 2'-OMe-nucleotide
  modified_base (14)..(14): 2'-fluoro-nucleotide
  modified_base (15)..(15): 2'-OMe-nucleotide
  modified_base (16)..(16): 2'-fluoro-nucleotide
  modified_base (17)..(17): 2'-OMe-nucleotide
  modified_base (18)..(18): 2'-fluoro-nucleotide
  modified_base (19)..(19): 2'-OMe-nucleotide
  modified_base (20)..(20): dT
  modified_base (21)..(21): dT
gcaguaguucucggucaggtt

SEQ ID NO: 1080 - DNA, 21 bp, Artificial Sequence
  source: /note="Description of Artificial Sequence: Synthetic oligonucleotide"
  source: /note="Description of Combined DNA/RNA Molecule: Synthetic oligonucleotide"
  modified_base (1)..(1): 2'-fluoro-nucleotide
  modified_base (2)..(2): 2'-fluoro-nucleotide
  modified_base (3)..(3): 2'-OMe-nucleotide
  modified_base (4)..(4): 2'-fluoro-nucleotide
  modified_base (5)..(5): 2'-OMe-nucleotide
  modified_base (6)..(6): 2'-fluoro-nucleotide
  modified_base (7)..(7): 2'-OMe-nucleotide
  modified_base (8)..(8): 2'-fluoro-nucleotide
  modified_base (9)..(9): 2'-OMe-nucleotide
  modified_base (10)..(10): 2'-fluoro-nucleotide
  modified_base (11)..(11): 2'-OMe-nucleotide
  modified_base (12)..(12): 2'-fluoro-nucleotide
  modified_base (13)..(13): 2'-OMe-nucleotide
  modified_base (14)..(14): 2'-fluoro-nucleotide
  modified_base (15)..(15): 2'-OMe-nucleotide
  modified_base (16)..(16): 2'-fluoro-nucleotide
  modified_base (17)..(17): 2'-OMe-nucleotide
  modified_base (18)..(18): 2'-fluoro-nucleotide
  modified_base (19)..(19): 2'-OMe-nucleotide
  modified_base (20)..(20): dT
  modified_base (21)..(21): dT
ugcaguaguucucggucagtt

SEQ ID NO: 1081 - DNA, 21 bp, Artificial Sequence
  source: /note="Description of Artificial Sequence: Synthetic oligonucleotide"
  source: /note="Description of Combined DNA/RNA Molecule: Synthetic oligonucleotide"
  modified_base (1)..(1): 2'-fluoro-nucleotide
  modified_base (2)..(2): 2'-fluoro-nucleotide
  modified_base (3)..(3): 2'-OMe-nucleotide
  modified_base (4)..(4): 2'-fluoro-nucleotide
  modified_base (5)..(5): 2'-OMe-nucleotide
  modified_base (6)..(6): 2'-fluoro-nucleotide
  modified_base (7)..(7): 2'-OMe-nucleotide
  modified_base (8)..(8): 2'-fluoro-nucleotide
  modified_base (9)..(9): 2'-OMe-nucleotide
  modified_base (10)..(10): 2'-fluoro-nucleotide
  modified_base (11)..(11): 2'-OMe-nucleotide
  modified_base (12)..(12): 2'-fluoro-nucleotide
  modified_base (13)..(13): 2'-OMe-nucleotide
  modified_base (14)..(14): 2'-fluoro-nucleotide
  modified_base (15)..(15): 2'-OMe-nucleotide
  modified_base (16)..(16): 2'-fluoro-nucleotide
  modified_base (17)..(17): 2'-OMe-nucleotide
  modified_base (18)..(18): 2'-fluoro-nucleotide
  modified_base (19)..(19): 2'-OMe-nucleotide
  modified_base (20)..(20): dT
  modified_base (21)..(21): dT
cugcaguaguucucggucatt

SEQ ID NO: 1082 - DNA, 21 bp, Artificial Sequence
  source: /note="Description of Artificial Sequence: Synthetic oligonucleotide"
  source: /note="Description of Combined DNA/RNA Molecule: Synthetic oligonucleotide"
  modified_base (1)..(1): 2'-fluoro-nucleotide
  modified_base (2)..(2): 2'-fluoro-nucleotide
  modified_base (3)..(3): 2'-OMe-nucleotide
  modified_base (4)..(4): 2'-fluoro-nucleotide
  modified_base (5)..(5): 2'-OMe-nucleotide
  modified_base (6)..(6): 2'-fluoro-nucleotide
  modified_base (7)..(7): 2'-OMe-nucleotide
  modified_base (8)..(8): 2'-fluoro-nucleotide
  modified_base (9)..(9): 2'-OMe-nucleotide
  modified_base (10)..(10): 2'-fluoro-nucleotide
  modified_base (11)..(11): 2'-OMe-nucleotide
  modified_base (12)..(12): 2'-fluoro-nucleotide
  modified_base (13)..(13): 2'-OMe-nucleotide
  modified_base (14)..(14): 2'-fluoro-nucleotide
  modified_base (15)..(15): 2'-OMe-nucleotide
  modified_base (16)..(16): 2'-fluoro-nucleotide
  modified_base (17)..(17): 2'-OMe-nucleotide
  modified_base (18)..(18): 2'-fluoro-nucleotide
  modified_base (19)..(19): 2'-OMe-nucleotide
  modified_base (20)..(20): dT
  modified_base (21)..(21): dT
uucccagaaucuggauucctt

SEQ ID NO: 1083 - DNA, 21 bp, Artificial Sequence
  source: /note="Description of Artificial Sequence: Synthetic oligonucleotide"
  source: /note="Description of Combined DNA/RNA Molecule: Synthetic oligonucleotide"
  modified_base (1)..(1): 2'-fluoro-nucleotide
  modified_base (2)..(2): 2'-fluoro-nucleotide
  modified_base (3)..(3): 2'-OMe-nucleotide
  modified_base (4)..(4): 2'-fluoro-nucleotide
  modified_base (5)..(5): 2'-OMe-nucleotide
  modified_base (6)..(6): 2'-fluoro-nucleotide
  modified_base (7)..(7): 2'-OMe-nucleotide
  modified_base (8)..(8): 2'-fluoro-nucleotide
  modified_base (9)..(9): 2'-OMe-nucleotide
  modified_base (10)..(10): 2'-fluoro-nucleotide
  modified_base (11)..(11): 2'-OMe-nucleotide
  modified_base (12)..(12): 2'-fluoro-nucleotide
  modified_base (13)..(13): 2'-OMe-nucleotide
  modified_base (14)..(14): 2'-fluoro-nucleotide
  modified_base (15)..(15): 2'-OMe-nucleotide
  modified_base (16)..(16): 2'-fluoro-nucleotide
  modified_base (17)..(17): 2'-OMe-nucleotide
  modified_base (18)..(18): 2'-fluoro-nucleotide
  modified_base (19)..(19): 2'-OMe-nucleotide
  modified_base (20)..(20): dT
  modified_base (21)..(21): dT
guuucccagaaucuggauutt

SEQ ID NO: 1084 - DNA, 21 bp, Artificial Sequence
  source: /note="Description of Artificial Sequence: Synthetic oligonucleotide"
  source: /note="Description of Combined DNA/RNA Molecule: Synthetic oligonucleotide"
  modified_base (1)..(1): 2'-fluoro-nucleotide
  modified_base (2)..(2): 2'-fluoro-nucleotide
  modified_base (3)..(3): 2'-OMe-nucleotide
  modified_base (4)..(4): 2'-fluoro-nucleotide
  modified_base (5)..(5): 2'-OMe-nucleotide
  modified_base (6)..(6): 2'-fluoro-nucleotide
  modified_base (7)..(7): 2'-OMe-nucleotide
  modified_base (8)..(8): 2'-fluoro-nucleotide
  modified_base (9)..(9): 2'-OMe-nucleotide
  modified_base (10)..(10): 2'-fluoro-nucleotide
  modified_base (11)..(11): 2'-OMe-nucleotide
  modified_base (12)..(12): 2'-fluoro-nucleotide
  modified_base (13)..(13): 2'-OMe-nucleotide
  modified_base (14)..(14): 2'-fluoro-nucleotide
  modified_base (15)..(15): 2'-OMe-nucleotide
  modified_base (16)..(16): 2'-fluoro-nucleotide
  modified_base (17)..(17): 2'-OMe-nucleotide
  modified_base (18)..(18): 2'-fluoro-nucleotide
  modified_base (19)..(19): 2'-OMe-nucleotide
  modified_base (20)..(20): dT
  modified_base (21)..(21): dT
accaggguuguuucccagatt

SEQ ID NO: 1085 - DNA, 21 bp, Artificial Sequence
  source: /note="Description of Artificial Sequence: Synthetic oligonucleotide"
  source: /note="Description of Combined DNA/RNA Molecule: Synthetic oligonucleotide"
  modified_base (1)..(1): 2'-fluoro-nucleotide
  modified_base (2)..(2): 2'-fluoro-nucleotide
  modified_base (3)..(3): 2'-OMe-nucleotide
  modified_base (4)..(4): 2'-fluoro-nucleotide
  modified_base (5)..(5): 2'-OMe-nucleotide
  modified_base (6)..(6): 2'-fluoro-nucleotide
  modified_base (7)..(7): 2'-OMe-nucleotide
  modified_base (8)..(8): 2'-fluoro-nucleotide
  modified_base (9)..(9): 2'-OMe-nucleotide
  modified_base (10)..(10): 2'-fluoro-nucleotide
  modified_base (11)..(11): 2'-OMe-nucleotide
  modified_base (12)..(12): 2'-fluoro-nucleotide
  modified_base (13)..(13): 2'-OMe-nucleotide
  modified_base (14)..(14): 2'-fluoro-nucleotide
  modified_base (15)..(15): 2'-OMe-nucleotide
  modified_base (16)..(16): 2'-fluoro-nucleotide
  modified_base (17)..(17): 2'-OMe-nucleotide
  modified_base (18)..(18): 2'-fluoro-nucleotide
  modified_base (19)..(19): 2'-OMe-nucleotide
  modified_base (20)..(20): dT
  modified_base (21)..(21): dT
caccaggguuguuucccagtt

SEQ ID NO: 1086 - DNA, 21 bp, Artificial Sequence
  source: /note="Description of Artificial Sequence: Synthetic oligonucleotide"
  source: /note="Description of Combined DNA/RNA Molecule: Synthetic oligonucleotide"
  modified_base (1)..(1): 2'-fluoro-nucleotide
  modified_base (2)..(2): 2'-fluoro-nucleotide
  modified_base (3)..(3): 2'-OMe-nucleotide
  modified_base (4)..(4): 2'-fluoro-nucleotide
  modified_base (5)..(5): 2'-OMe-nucleotide
  modified_base (6)..(6): 2'-fluoro-nucleotide
  modified_base (7)..(7): 2'-OMe-nucleotide
  modified_base (8)..(8): 2'-fluoro-nucleotide
  modified_base (9)..(9): 2'-OMe-nucleotide
  modified_base (10)..(10): 2'-fluoro-nucleotide
  modified_base (11)..(11): 2'-OMe-nucleotide
  modified_base (12)..(12): 2'-fluoro-nucleotide
  modified_base (13)..(13): 2'-OMe-nucleotide
  modified_base (14)..(14): 2'-fluoro-nucleotide
  modified_base (15)..(15): 2'-OMe-nucleotide
  modified_base (16)..(16): 2'-fluoro-nucleotide
  modified_base (17)..(17): 2'-OMe-nucleotide
  modified_base (18)..(18): 2'-fluoro-nucleotide
  modified_base (19)..(19): 2'-OMe-nucleotide
  modified_base (20)..(20): dT
  modified_base (21)..(21): dT
aacaccaggguuguuuccctt

SEQ ID NO: 1087 - DNA, 21 bp, Artificial Sequence
  source: /note="Description of Artificial Sequence: Synthetic oligonucleotide"
  source: /note="Description of Combined DNA/RNA Molecule: Synthetic oligonucleotide"
  modified_base (1)..(1): 2'-fluoro-nucleotide
  modified_base (2)..(2): 2'-fluoro-nucleotide
  modified_base (3)..(3): 2'-OMe-nucleotide
  modified_base (4)..(4): 2'-fluoro-nucleotide
  modified_base (5)..(5): 2'-OMe-nucleotide
  modified_base (6)..(6): 2'-fluoro-nucleotide
  modified_base (7)..(7): 2'-OMe-nucleotide
  modified_base (8)..(8): 2'-fluoro-nucleotide
  modified_base (9)..(9): 2'-OMe-nucleotide
  modified_base (10)..(10): 2'-fluoro-nucleotide
  modified_base (11)..(11): 2'-OMe-nucleotide
  modified_base (12)..(12): 2'-fluoro-nucleotide
  modified_base (13)..(13): 2'-OMe-nucleotide
  modified_base (14)..(14): 2'-fluoro-nucleotide
  modified_base (15)..(15): 2'-OMe-nucleotide
  modified_base (16)..(16): 2'-fluoro-nucleotide
  modified_base (17)..(17): 2'-OMe-nucleotide
  modified_base (18)..(18): 2'-fluoro-nucleotide
  modified_base (19)..(19): 2'-OMe-nucleotide
  modified_base (20)..(20): dT
  modified_base (21)..(21): dT
guaacaccaggguuguuuctt

SEQ ID NO: 1088 - DNA, 21 bp, Artificial Sequence
  source: /note="Description of Artificial Sequence: Synthetic oligonucleotide"
  source: /note="Description of Combined DNA/RNA Molecule: Synthetic oligonucleotide"
  modified_base (1)..(1): 2'-fluoro-nucleotide
  modified_base (2)..(2): 2'-fluoro-nucleotide
  modified_base (3)..(3): 2'-OMe-nucleotide
  modified_base (4)..(4): 2'-fluoro-nucleotide
  modified_base (5)..(5): 2'-OMe-nucleotide
  modified_base (6)..(6): 2'-fluoro-nucleotide
  modified_base (7)..(7): 2'-OMe-nucleotide
  modified_base (8)..(8): 2'-fluoro-nucleotide
  modified_base (9)..(9): 2'-OMe-nucleotide
  modified_base (10)..(10): 2'-fluoro-nucleotide
  modified_base (11)..(11): 2'-OMe-nucleotide
  modified_base (12)..(12): 2'-fluoro-nucleotide
  modified_base (13)..(13): 2'-OMe-nucleotide
  modified_base (14)..(14): 2'-fluoro-nucleotide
  modified_base (15)..(15): 2'-OMe-nucleotide
  modified_base (16)..(16): 2'-fluoro-nucleotide
  modified_base (17)..(17): 2'-OMe-nucleotide
  modified_base (18)..(18): 2'-fluoro-nucleotide
  modified_base (19)..(19): 2'-OMe-nucleotide
  modified_base (20)..(20): dT
  modified_base (21)..(21): dT
uguaacaccaggguuguuutt

SEQ ID NO: 1089 - DNA, 21 bp, Artificial Sequence
  source: /note="Description of Artificial Sequence: Synthetic oligonucleotide"
  source: /note="Description of Combined DNA/RNA Molecule: Synthetic oligonucleotide"
  modified_base (1)..(1): 2'-fluoro-nucleotide
  modified_base (2)..(2): 2'-fluoro-nucleotide
  modified_base (3)..(3): 2'-OMe-nucleotide
  modified_base (4)..(4): 2'-fluoro-nucleotide
  modified_base (5)..(5): 2'-OMe-nucleotide
  modified_base (6)..(6): 2'-fluoro-nucleotide
  modified_base (7)..(7): 2'-OMe-nucleotide
  modified_base (8)..(8): 2'-fluoro-nucleotide
  modified_base (9)..(9): 2'-OMe-nucleotide
  modified_base (10)..(10): 2'-fluoro-nucleotide
  modified_base (11)..(11): 2'-OMe-nucleotide
  modified_base (12)..(12): 2'-fluoro-nucleotide
  modified_base (13)..(13): 2'-OMe-nucleotide
  modified_base (14)..(14): 2'-fluoro-nucleotide
  modified_base (15)..(15): 2'-OMe-nucleotide
  modified_base (16)..(16): 2'-fluoro-nucleotide
  modified_base (17)..(17): 2'-OMe-nucleotide
  modified_base (18)..(18): 2'-fluoro-nucleotide
  modified_base (19)..(19): 2'-OMe-nucleotide
  modified_base (20)..(20): dT
  modified_base (21)..(21): dT
guguaacaccaggguuguutt

SEQ ID NO: 1090 - DNA, 21 bp, Artificial Sequence
  source: /note="Description of Artificial Sequence: Synthetic oligonucleotide"
  source: /note="Description of Combined DNA/RNA Molecule: Synthetic oligonucleotide"
  modified_base (1)..(1): 2'-fluoro-nucleotide
  modified_base (2)..(2): 2'-fluoro-nucleotide
  modified_base (3)..(3): 2'-OMe-nucleotide
  modified_base (4)..(4): 2'-fluoro-nucleotide
  modified_base (5)..(5): 2'-OMe-nucleotide
  modified_base (6)..(6): 2'-fluoro-nucleotide
  modified_base (7)..(7): 2'-OMe-nucleotide
  modified_base (8)..(8): 2'-fluoro-nucleotide
  modified_base (9)..(9): 2'-OMe-nucleotide
  modified_base (10)..(10): 2'-fluoro-nucleotide
  modified_base (11)..(11): 2'-OMe-nucleotide
  modified_base (12)..(12): 2'-fluoro-nucleotide
  modified_base (13)..(13): 2'-OMe-nucleotide
  modified_base (14)..(14): 2'-fluoro-nucleotide
  modified_base (15)..(15): 2'-OMe-nucleotide
  modified_base (16)..(16): 2'-fluoro-nucleotide
  modified_base (17)..(17): 2'-OMe-nucleotide
  modified_base (18)..(18): 2'-fluoro-nucleotide
  modified_base (19)..(19): 2'-OMe-nucleotide
  modified_base (20)..(20): dT
  modified_base (21)..(21): dT
uguguaacaccaggguugutt

SEQ ID NO: 1091 - DNA, 21 bp, Artificial Sequence
  source: /note="Description of Artificial Sequence: Synthetic oligonucleotide"
  source: /note="Description of Combined DNA/RNA Molecule: Synthetic oligonucleotide"
  modified_base (1)..(1): 2'-fluoro-nucleotide
  modified_base (2)..(2): 2'-fluoro-nucleotide
  modified_base (3)..(3): 2'-OMe-nucleotide
  modified_base (4)..(4): 2'-fluoro-nucleotide
  modified_base (5)..(5): 2'-OMe-nucleotide
  modified_base (6)..(6): 2'-fluoro-nucleotide
  modified_base (7)..(7): 2'-OMe-nucleotide
  modified_base (8)..(8): 2'-fluoro-nucleotide
  modified_base (9)..(9): 2'-OMe-nucleotide
  modified_base (10)..(10): 2'-fluoro-nucleotide
  modified_base (11)..(11): 2'-OMe-nucleotide
  modified_base (12)..(12): 2'-fluoro-nucleotide
  modified_base (13)..(13): 2'-OMe-nucleotide
  modified_base (14)..(14): 2'-fluoro-nucleotide
  modified_base (15)..(15): 2'-OMe-nucleotide
  modified_base (16)..(16): 2'-fluoro-nucleotide
  modified_base (17)..(17): 2'-OMe-nucleotide
  modified_base (18)..(18): 2'-fluoro-nucleotide
  modified_base (19)..(19): 2'-OMe-nucleotide
  modified_base (20)..(20): dT
  modified_base (21)..(21): dT
uuguguaacaccaggguugtt

SEQ ID NO: 1092 - DNA, 21 bp, Artificial Sequence
  source: /note="Description of Artificial Sequence: Synthetic oligonucleotide"
  source: /note="Description of Combined DNA/RNA Molecule: Synthetic oligonucleotide"
  modified_base (1)..(1): 2'-fluoro-nucleotide
  modified_base (2)..(2): 2'-fluoro-nucleotide
  modified_base (3)..(3): 2'-OMe-nucleotide
  modified_base (4)..(4): 2'-fluoro-nucleotide
  modified_base (5)..(5): 2'-OMe-nucleotide
  modified_base (6)..(6): 2'-fluoro-nucleotide
  modified_base (7)..(7): 2'-OMe-nucleotide
  modified_base (8)..(8): 2'-fluoro-nucleotide
  modified_base (9)..(9): 2'-OMe-nucleotide
  modified_base (10)..(10): 2'-fluoro-nucleotide
  modified_base (11)..(11): 2'-OMe-nucleotide
  modified_base (12)..(12): 2'-fluoro-nucleotide
  modified_base (13)..(13): 2'-OMe-nucleotide
  modified_base (14)..(14): 2'-fluoro-nucleotide
  modified_base (15)..(15): 2'-OMe-nucleotide
  modified_base (16)..(16): 2'-fluoro-nucleotide
  modified_base (17)..(17): 2'-OMe-nucleotide
  modified_base (18)..(18): 2'-fluoro-nucleotide
  modified_base (19)..(19): 2'-OMe-nucleotide
  modified_base (20)..(20): dT
  modified_base (21)..(21): dT
guuguguaacaccaggguutt

SEQ ID NO: 1093 - DNA, 21 bp, Artificial Sequence
  source: /note="Description of Artificial Sequence: Synthetic oligonucleotide"
  source: /note="Description of Combined DNA/RNA Molecule: Synthetic oligonucleotide"
  modified_base (1)..(1): 2'-fluoro-nucleotide
  modified_base (2)..(2): 2'-fluoro-nucleotide
  modified_base (3)..(3): 2'-OMe-nucleotide
  modified_base (4)..(4): 2'-fluoro-nucleotide
  modified_base (5)..(5): 2'-OMe-nucleotide
  modified_base (6)..(6): 2'-fluoro-nucleotide
  modified_base (7)..(7): 2'-OMe-nucleotide
  modified_base (8)..(8): 2'-fluoro-nucleotide
  modified_base (9)..(9): 2'-OMe-nucleotide
  modified_base (10)..(10): 2'-fluoro-nucleotide
  modified_base (11)..(11): 2'-OMe-nucleotide
  modified_base (12)..(12): 2'-fluoro-nucleotide
  modified_base (13)..(13): 2'-OMe-nucleotide
  modified_base (14)..(14): 2'-fluoro-nucleotide
  modified_base (15)..(15): 2'-OMe-nucleotide
  modified_base (16)..(16): 2'-fluoro-nucleotide
  modified_base (17)..(17): 2'-OMe-nucleotide
  modified_base (18)..(18): 2'-fluoro-nucleotide
  modified_base (19)..(19): 2'-OMe-nucleotide
  modified_base (20)..(20): dT
  modified_base (21)..(21): dT
uacucccaccucacacacgtt

SEQ ID NO: 1094 - DNA, 21 bp, Artificial Sequence
  source: /note="Description of Artificial Sequence: Synthetic oligonucleotide"
  source: /note="Description of Combined DNA/RNA Molecule: Synthetic oligonucleotide"
  modified_base (1)..(1): 2'-fluoro-nucleotide
  modified_base (2)..(2): 2'-fluoro-nucleotide
  modified_base (3)..(3): 2'-OMe-nucleotide
  modified_base (4)..(4): 2'-fluoro-nucleotide
  modified_base (5)..(5): 2'-OMe-nucleotide
  modified_base (6)..(6): 2'-fluoro-nucleotide
  modified_base (7)..(7): 2'-OMe-nucleotide
  modified_base (8)..(8): 2'-fluoro-nucleotide
  modified_base (9)..(9): 2'-OMe-nucleotide
  modified_base (10)..(10): 2'-fluoro-nucleotide
  modified_base (11)..(11): 2'-OMe-nucleotide
  modified_base (12)..(12): 2'-fluoro-nucleotide
  modified_base (13)..(13): 2'-OMe-nucleotide
  modified_base (14)..(14): 2'-fluoro-nucleotide
  modified_base (15)..(15): 2'-OMe-nucleotide
  modified_base (16)..(16): 2'-fluoro-nucleotide
  modified_base (17)..(17): 2'-OMe-nucleotide
  modified_base (18)..(18): 2'-fluoro-nucleotide
  modified_base (19)..(19): 2'-OMe-nucleotide
  modified_base (20)..(20): dT
  modified_base (21)..(21): dT
gugucagauugcaguacuctt

SEQ ID NO: 1095 - DNA, 21 bp, Artificial Sequence
  source: /note="Description of Artificial Sequence: Synthetic oligonucleotide"
  source: /note="Description of Combined DNA/RNA Molecule: Synthetic oligonucleotide"
  modified_base (1)..(1): 2'-fluoro-nucleotide
  modified_base (2)..(2): 2'-fluoro-nucleotide
  modified_base (3)..(3): 2'-OMe-nucleotide
  modified_base (4)..(4): 2'-fluoro-nucleotide
  modified_base (5)..(5): 2'-OMe-nucleotide
  modified_base (6)..(6): 2'-fluoro-nucleotide
  modified_base (7)..(7): 2'-OMe-nucleotide
  modified_base (8)..(8): 2'-fluoro-nucleotide
  modified_base (9)..(9): 2'-OMe-nucleotide
  modified_base (10)..(10): 2'-fluoro-nucleotide
  modified_base (11)..(11): 2'-OMe-nucleotide
  modified_base (12)..(12): 2'-fluoro-nucleotide
  modified_base (13)..(13): 2'-OMe-nucleotide
  modified_base (14)..(14): 2'-fluoro-nucleotide
  modified_base (15)..(15): 2'-OMe-nucleotide
  modified_base (16)..(16): 2'-fluoro-nucleotide
  modified_base (17)..(17): 2'-OMe-nucleotide
  modified_base (18)..(18): 2'-fluoro-nucleotide
  modified_base (19)..(19): 2'-OMe-nucleotide
  modified_base (20)..(20): dT
  modified_base (21)..(21): dT
agcauugugucagauugcatt

SEQ ID NO: 1096 - DNA, 21 bp, Artificial Sequence
  source: /note="Description of Artificial Sequence: Synthetic oligonucleotide"
  source: /note="Description of Combined DNA/RNA Molecule: Synthetic oligonucleotide"
  modified_base (1)..(1): 2'-fluoro-nucleotide
  modified_base (2)..(2): 2'-fluoro-nucleotide
  modified_base (3)..(3): 2'-OMe-nucleotide
  modified_base (4)..(4): 2'-fluoro-nucleotide
  modified_base (5)..(5): 2'-OMe-nucleotide
  modified_base (6)..(6): 2'-fluoro-nucleotide
  modified_base (7)..(7): 2'-OMe-nucleotide
  modified_base (8)..(8): 2'-fluoro-nucleotide
  modified_base (9)..(9): 2'-OMe-nucleotide
  modified_base (10)..(10): 2'-fluoro-nucleotide
  modified_base (11)..(11): 2'-OMe-nucleotide
  modified_base (12)..(12): 2'-fluoro-nucleotide
  modified_base (13)..(13): 2'-OMe-nucleotide
  modified_base (14)..(14): 2'-fluoro-nucleotide
  modified_base (15)..(15): 2'-OMe-nucleotide
  modified_base (16)..(16): 2'-fluoro-nucleotide
  modified_base (17)..(17): 2'-OMe-nucleotide
  modified_base (18)..(18): 2'-fluoro-nucleotide
  modified_base (19)..(19): 2'-OMe-nucleotide
  modified_base (20)..(20): dT
  modified_base (21)..(21): dT
gagcauugugucagauugctt

SEQ ID NO: 1097 - DNA, 21 bp, Artificial Sequence
  source: /note="Description of Artificial Sequence: Synthetic oligonucleotide"
  source: /note="Description of Combined DNA/RNA Molecule: Synthetic oligonucleotide"
  modified_base (1)..(1): 2'-fluoro-nucleotide
  modified_base (2)..(2): 2'-fluoro-nucleotide
  modified_base (3)..(3): 2'-OMe-nucleotide
  modified_base (4)..(4): 2'-fluoro-nucleotide
  modified_base (5)..(5): 2'-OMe-nucleotide
  modified_base (6)..(6): 2'-fluoro-nucleotide
  modified_base (7)..(7): 2'-OMe-nucleotide
  modified_base (8)..(8): 2'-fluoro-nucleotide
  modified_base (9)..(9): 2'-OMe-nucleotide
  modified_base (10)..(10): 2'-fluoro-nucleotide
  modified_base (11)..(11): 2'-OMe-nucleotide
  modified_base (12)..(12): 2'-fluoro-nucleotide
  modified_base (13)..(13): 2'-OMe-nucleotide
  modified_base (14)..(14): 2'-fluoro-nucleotide
  modified_base (15)..(15): 2'-OMe-nucleotide
  modified_base (16)..(16): 2'-fluoro-nucleotide
  modified_base (17)..(17): 2'-OMe-nucleotide
  modified_base (18)..(18): 2'-fluoro-nucleotide
  modified_base (19)..(19): 2'-OMe-nucleotide
  modified_base (20)..(20): dT
  modified_base (21)..(21): dT
ugagcauugugucagauugtt

SEQ ID NO: 1098 - DNA, 21 bp, Artificial Sequence
  source: /note="Description of Artificial Sequence: Synthetic oligonucleotide"
  source: /note="Description of Combined DNA/RNA Molecule: Synthetic oligonucleotide"
  modified_base (1)..(1): 2'-fluoro-nucleotide
  modified_base (2)..(2): 2'-fluoro-nucleotide
  modified_base (3)..(3): 2'-OMe-nucleotide
  modified_base (4)..(4): 2'-fluoro-nucleotide
  modified_base (5)..(5): 2'-OMe-nucleotide
  modified_base (6)..(6): 2'-fluoro-nucleotide
  modified_base (7)..(7): 2'-OMe-nucleotide
  modified_base (8)..(8): 2'-fluoro-nucleotide
  modified_base (9)..(9): 2'-OMe-nucleotide
  modified_base (10)..(10): 2'-fluoro-nucleotide
  modified_base (11)..(11): 2'-OMe-nucleotide
  modified_base (12)..(12): 2'-fluoro-nucleotide
  modified_base (13)..(13): 2'-OMe-nucleotide
  modified_base (14)..(14): 2'-fluoro-nucleotide
  modified_base (15)..(15): 2'-OMe-nucleotide
  modified_base (16)..(16): 2'-fluoro-nucleotide
  modified_base (17)..(17): 2'-OMe-nucleotide
  modified_base (18)..(18): 2'-fluoro-nucleotide
  modified_base (19)..(19): 2'-OMe-nucleotide
  modified_base (20)..(20): dT
  modified_base (21)..(21): dT
acuggaacaacagugggagtt

SEQ ID NO: 1099 - DNA, 21 bp, Artificial Sequence
  source: /note="Description of Artificial Sequence: Synthetic oligonucleotide"
  source: /note="Description of Combined DNA/RNA Molecule: Synthetic oligonucleotide"
  modified_base (1)..(1): 2'-fluoro-nucleotide
  modified_base (2)..(2): 2'-fluoro-nucleotide
  modified_base (3)..(3): 2'-OMe-nucleotide
  modified_base (4)..(4): 2'-fluoro-nucleotide
  modified_base (5)..(5): 2'-OMe-nucleotide
  modified_base (6)..(6): 2'-fluoro-nucleotide
  modified_base (7)..(7): 2'-OMe-nucleotide
  modified_base (8)..(8): 2'-fluoro-nucleotide
  modified_base (9)..(9): 2'-OMe-nucleotide
  modified_base (10)..(10): 2'-fluoro-nucleotide
  modified_base (11)..(11): 2'-OMe-nucleotide
  modified_base (12)..(12): 2'-fluoro-nucleotide
  modified_base (13)..(13): 2'-OMe-nucleotide
  modified_base (14)..(14): 2'-fluoro-nucleotide
  modified_base (15)..(15): 2'-OMe-nucleotide
  modified_base (16)..(16): 2'-fluoro-nucleotide
  modified_base (17)..(17): 2'-OMe-nucleotide
  modified_base (18)..(18): 2'-fluoro-nucleotide
  modified_base (19)..(19): 2'-OMe-nucleotide
  modified_base (20)..(20): dT
  modified_base (21)..(21): dT
aacuggaacaacagugggatt

SEQ ID NO: 1100 - DNA, 21 bp, Artificial Sequence
  source: /note="Description of Artificial Sequence: Synthetic oligonucleotide"
  source: /note="Description of Combined DNA/RNA Molecule: Synthetic oligonucleotide"
  modified_base (1)..(1): 2'-fluoro-nucleotide
  modified_base (2)..(2): 2'-fluoro-nucleotide
  modified_base (3)..(3): 2'-OMe-nucleotide
  modified_base (4)..(4): 2'-fluoro-nucleotide
  modified_base (5)..(5): 2'-OMe-nucleotide
  modified_base (6)..(6): 2'-fluoro-nucleotide
  modified_base (7)..(7): 2'-OMe-nucleotide
  modified_base (8)..(8): 2'-fluoro-nucleotide
  modified_base (9)..(9): 2'-OMe-nucleotide
  modified_base (10)..(10): 2'-fluoro-nucleotide
  modified_base (11)..(11): 2'-OMe-nucleotide
  modified_base (12)..(12): 2'-fluoro-nucleotide
  modified_base (13)..(13): 2'-OMe-nucleotide
  modified_base (14)..(14): 2'-fluoro-nucleotide
  modified_base (15)..(15): 2'-OMe-nucleotide
  modified_base (16)..(16): 2'-fluoro-nucleotide
  modified_base (17)..(17): 2'-OMe-nucleotide
  modified_base (18)..(18): 2'-fluoro-nucleotide
  modified_base (19)..(19): 2'-OMe-nucleotide
  modified_base (20)..(20): dT
  modified_base (21)..(21): dT
ggaacuggaacaacaguggtt

SEQ ID NO: 1101 - DNA, 21 bp, Artificial Sequence
  source: /note="Description of Artificial Sequence: Synthetic oligonucleotide"
  source: /note="Description of Combined DNA/RNA Molecule: Synthetic oligonucleotide"
  modified_base (1)..(1): 2'-fluoro-nucleotide
  modified_base (2)..(2): 2'-fluoro-nucleotide
  modified_base (3)..(3): 2'-OMe-nucleotide
  modified_base (4)..(4): 2'-fluoro-nucleotide
  modified_base (5)..(5): 2'-OMe-nucleotide
  modified_base (6)..(6): 2'-fluoro-nucleotide
  modified_base (7)..(7): 2'-OMe-nucleotide
  modified_base (8)..(8): 2'-fluoro-nucleotide
  modified_base (9)..(9): 2'-OMe-nucleotide
  modified_base (10)..(10): 2'-fluoro-nucleotide
  modified_base (11)..(11): 2'-OMe-nucleotide
  modified_base (12)..(12): 2'-fluoro-nucleotide
  modified_base (13)..(13): 2'-OMe-nucleotide
  modified_base (14)..(14): 2'-fluoro-nucleotide
  modified_base (15)..(15): 2'-OMe-nucleotide
  modified_base (16)..(16): 2'-fluoro-nucleotide
  modified_base (17)..(17): 2'-OMe-nucleotide
  modified_base (18)..(18): 2'-fluoro-nucleotide
  modified_base (19)..(19): 2'-OMe-nucleotide
  modified_base (20)..(20): dT
  modified_base (21)..(21): dT
uggaacuggaacaacagugtt

SEQ ID NO: 1102 - DNA, 21 bp, Artificial Sequence
  source: /note="Description of Artificial Sequence: Synthetic oligonucleotide"
  source: /note="Description of Combined DNA/RNA Molecule: Synthetic oligonucleotide"
  modified_base (1)..(1): 2'-fluoro-nucleotide
  modified_base (2)..(2): 2'-fluoro-nucleotide
  modified_base (3)..(3): 2'-OMe-nucleotide
  modified_base (4)..(4): 2'-fluoro-nucleotide
  modified_base (5)..(5): 2'-OMe-nucleotide
  modified_base (6)..(6): 2'-fluoro-nucleotide
  modified_base (7)..(7): 2'-OMe-nucleotide
  modified_base (8)..(8): 2'-fluoro-nucleotide
  modified_base (9)..(9): 2'-OMe-nucleotide
  modified_base (10)..(10): 2'-fluoro-nucleotide
  modified_base (11)..(11): 2'-OMe-nucleotide
  modified_base (12)..(12): 2'-fluoro-nucleotide
  modified_base (13)..(13): 2'-OMe-nucleotide
  modified_base (14)..(14): 2'-fluoro-nucleotide
  modified_base (15)..(15): 2'-OMe-nucleotide
  modified_base (16)..(16): 2'-fluoro-nucleotide
  modified_base (17)..(17): 2'-OMe-nucleotide
  modified_base (18)..(18): 2'-fluoro-nucleotide
  modified_base (19)..(19): 2'-OMe-nucleotide
  modified_base (20)..(20): dT
  modified_base (21)..(21): dT
ugcuuggaacuggaacaactt

SEQ ID NO: 1103 - DNA, 21 bp, Artificial Sequence
  source: /note="Description of Artificial Sequence: Synthetic oligonucleotide"
  source: /note="Description of Combined DNA/RNA Molecule: Synthetic oligonucleotide"
  modified_base (1)..(1): 2'-fluoro-nucleotide
  modified_base (2)..(2): 2'-fluoro-nucleotide
  modified_base (3)..(3): 2'-OMe-nucleotide
  modified_base (4)..(4): 2'-fluoro-nucleotide
  modified_base (5)..(5): 2'-OMe-nucleotide
  modified_base (6)..(6): 2'-fluoro-nucleotide
  modified_base (7)..(7): 2'-OMe-nucleotide
  modified_base (8)..(8): 2'-fluoro-nucleotide
  modified_base (9)..(9): 2'-OMe-nucleotide
  modified_base (10)..(10): 2'-fluoro-nucleotide
  modified_base (11)..(11): 2'-OMe-nucleotide
  modified_base (12)..(12): 2'-fluoro-nucleotide
  modified_base (13)..(13): 2'-OMe-nucleotide
  modified_base (14)..(14): 2'-fluoro-nucleotide
  modified_base (15)..(15): 2'-OMe-nucleotide
  modified_base (16)..(16): 2'-fluoro-nucleotide
  modified_base (17)..(17): 2'-OMe-nucleotide
  modified_base (18)..(18): 2'-fluoro-nucleotide
  modified_base (19)..(19): 2'-OMe-nucleotide
  modified_base (20)..(20): dT
  modified_base (21)..(21): dT
caugcuuggaacuggaacatt

SEQ ID NO: 1104 - DNA, 21 bp, Artificial Sequence
  source: /note="Description of Artificial Sequence: Synthetic oligonucleotide"
  source: /note="Description of Combined DNA/RNA Molecule: Synthetic oligonucleotide"
  modified_base (1)..(1): 2'-fluoro-nucleotide
  modified_base (2)..(2): 2'-fluoro-nucleotide
  modified_base (3)..(3): 2'-OMe-nucleotide
  modified_base (4)..(4): 2'-fluoro-nucleotide
  modified_base (5)..(5): 2'-OMe-nucleotide
  modified_base (6)..(6): 2'-fluoro-nucleotide
  modified_base (7)..(7): 2'-OMe-nucleotide
  modified_base (8)..(8): 2'-fluoro-nucleotide
  modified_base (9)..(9): 2'-OMe-nucleotide
  modified_base (10)..(10): 2'-fluoro-nucleotide
  modified_base (11)..(11): 2'-OMe-nucleotide
  modified_base (12)..(12): 2'-fluoro-nucleotide
  modified_base (13)..(13): 2'-OMe-nucleotide
  modified_base (14)..(14): 2'-fluoro-nucleotide
  modified_base (15)..(15): 2'-OMe-nucleotide
  modified_base (16)..(16): 2'-fluoro-nucleotide
  modified_base (17)..(17): 2'-OMe-nucleotide
  modified_base (18)..(18): 2'-fluoro-nucleotide
  modified_base (19)..(19): 2'-OMe-nucleotide
  modified_base (20)..(20): dT
  modified_base (21)..(21): dT
ccaugcuuggaacuggaactt

SEQ ID NO: 1105 - DNA, 21 bp, Artificial Sequence
  source: /note="Description of Artificial Sequence: Synthetic oligonucleotide"
  source: /note="Description of Combined DNA/RNA Molecule: Synthetic oligonucleotide"
  modified_base (1)..(1): 2'-fluoro-nucleotide
  modified_base (2)..(2): 2'-fluoro-nucleotide
  modified_base (3)..(3): 2'-OMe-nucleotide
  modified_base (4)..(4): 2'-fluoro-nucleotide
  modified_base (5)..(5): 2'-OMe-nucleotide
  modified_base (6)..(6): 2'-fluoro-nucleotide
  modified_base (7)..(7): 2'-OMe-nucleotide
  modified_base (8)..(8): 2'-fluoro-nucleotide
  modified_base (9)..(9): 2'-OMe-nucleotide
  modified_base (10)..(10): 2'-fluoro-nucleotide
  modified_base (11)..(11): 2'-OMe-nucleotide
  modified_base (12)..(12): 2'-fluoro-nucleotide
  modified_base (13)..(13): 2'-OMe-nucleotide
  modified_base (14)..(14): 2'-fluoro-nucleotide
  modified_base (15)..(15): 2'-OMe-nucleotide
  modified_base (16)..(16): 2'-fluoro-nucleotide
  modified_base (17)..(17): 2'-OMe-nucleotide
  modified_base (18)..(18): 2'-fluoro-nucleotide
  modified_base (19)..(19): 2'-OMe-nucleotide
  modified_base (20)..(20): dT
  modified_base (21)..(21): dT
uucagaaugagccuccaugtt

SEQ ID NO: 1106 - DNA, 21 bp, Artificial Sequence
  source: /note="Description of Artificial Sequence: Synthetic oligonucleotide"
  source: /note="Description of Combined DNA/RNA Molecule: Synthetic oligonucleotide"
  modified_base (1)..(1): 2'-fluoro-nucleotide
  modified_base (2)..(2): 2'-fluoro-nucleotide
  modified_base (3)..(3): 2'-OMe-nucleotide
  modified_base (4)..(4): 2'-fluoro-nucleotide
  modified_base (5)..(5): 2'-OMe-nucleotide
  modified_base (6)..(6): 2'-fluoro-nucleotide
  modified_base (7)..(7): 2'-OMe-nucleotide
  modified_base (8)..(8): 2'-fluoro-nucleotide
  modified_base (9)..(9): 2'-OMe-nucleotide
  modified_base (10)..(10): 2'-fluoro-nucleotide
  modified_base (11)..(11): 2'-OMe-nucleotide
  modified_base (12)..(12): 2'-fluoro-nucleotide
  modified_base (13)..(13): 2'-OMe-nucleotide
  modified_base (14)..(14): 2'-fluoro-nucleotide
  modified_base (15)..(15): 2'-OMe-nucleotide
  modified_base (16)..(16): 2'-fluoro-nucleotide
  modified_base (17)..(17): 2'-OMe-nucleotide
  modified_base (18)..(18): 2'-fluoro-nucleotide
  modified_base (19)..(19): 2'-OMe-nucleotide
  modified_base (20)..(20): dT
  modified_base (21)..(21): dT
cuucagaaugagccuccautt

SEQ ID NO: 1107 - DNA, 21 bp, Artificial Sequence
  source: /note="Description of Artificial Sequence: Synthetic oligonucleotide"
  source: /note="Description of Combined DNA/RNA Molecule: Synthetic oligonucleotide"
  modified_base (1)..(1): 2'-fluoro-nucleotide
  modified_base (2)..(2): 2'-fluoro-nucleotide
  modified_base (3)..(3): 2'-OMe-nucleotide
  modified_base (4)..(4): 2'-fluoro-nucleotide
  modified_base (5)..(5): 2'-OMe-nucleotide
  modified_base (6)..(6): 2'-fluoro-nucleotide
  modified_base (7)..(7): 2'-OMe-nucleotide
  modified_base (8)..(8): 2'-fluoro-nucleotide
  modified_base (9)..(9): 2'-OMe-nucleotide
  modified_base (10)..(10): 2'-fluoro-nucleotide
  modified_base (11)..(11): 2'-OMe-nucleotide
  modified_base (12)..(12): 2'-fluoro-nucleotide
  modified_base (13)..(13): 2'-OMe-nucleotide
  modified_base (14)..(14): 2'-fluoro-nucleotide
  modified_base (15)..(15): 2'-OMe-nucleotide
  modified_base (16)..(16): 2'-fluoro-nucleotide
  modified_base (17)..(17): 2'-OMe-nucleotide
  modified_base (18)..(18): 2'-fluoro-nucleotide
  modified_base (19)..(19): 2'-OMe-nucleotide
  modified_base (20)..(20): dT
  modified_base (21)..(21): dT
ugcuucagaaugagccucctt

SEQ ID NO: 1108 - DNA, 21 bp, Artificial Sequence
  source: /note="Description of Artificial Sequence: Synthetic oligonucleotide"
  source: /note="Description of Combined DNA/RNA Molecule: Synthetic oligonucleotide"
  modified_base (1)..(1): 2'-fluoro-nucleotide
  modified_base (2)..(2): 2'-fluoro-nucleotide
  modified_base (3)..(3): 2'-OMe-nucleotide
  modified_base (4)..(4): 2'-fluoro-nucleotide
  modified_base (5)..(5): 2'-OMe-nucleotide
  modified_base (6)..(6): 2'-fluoro-nucleotide
  modified_base (7)..(7): 2'-OMe-nucleotide
  modified_base (8)..(8): 2'-fluoro-nucleotide
  modified_base (9)..(9): 2'-OMe-nucleotide
  modified_base (10)..(10): 2'-fluoro-nucleotide
  modified_base (11)..(11): 2'-OMe-nucleotide
  modified_base (12)..(12): 2'-fluoro-nucleotide
  modified_base (13)..(13): 2'-OMe-nucleotide
  modified_base (14)..(14): 2'-fluoro-nucleotide
  modified_base (15)..(15): 2'-OMe-nucleotide
  modified_base (16)..(16): 2'-fluoro-nucleotide
  modified_base (17)..(17): 2'-OMe-nucleotide
  modified_base (18)..(18): 2'-fluoro-nucleotide
  modified_base (19)..(19): 2'-OMe-nucleotide
  modified_base (20)..(20): dT
  modified_base (21)..(21): dT
uuggugcugcuucagaaugtt

SEQ ID NO: 1109 - DNA, 21 bp, Artificial Sequence
  source: /note="Description of Artificial Sequence: Synthetic oligonucleotide"
  source: /note="Description of Combined DNA/RNA Molecule: Synthetic oligonucleotide"
  modified_base (1)..(1): 2'-fluoro-nucleotide
  modified_base (2)..(2): 2'-fluoro-nucleotide
  modified_base (3)..(3): 2'-OMe-nucleotide
  modified_base (4)..(4): 2'-fluoro-nucleotide
  modified_base (5)..(5): 2'-OMe-nucleotide
  modified_base (6)..(6): 2'-fluoro-nucleotide
  modified_base (7)..(7): 2'-OMe-nucleotide
  modified_base (8)..(8): 2'-fluoro-nucleotide
  modified_base (9)..(9): 2'-OMe-nucleotide
  modified_base (10)..(10): 2'-fluoro-nucleotide
  modified_base (11)..(11): 2'-OMe-nucleotide
  modified_base (12)..(12): 2'-fluoro-nucleotide
  modified_base (13)..(13): 2'-OMe-nucleotide
  modified_base (14)..(14): 2'-fluoro-nucleotide
  modified_base (15)..(15): 2'-OMe-nucleotide
  modified_base (16)..(16): 2'-fluoro-nucleotide
  modified_base (17)..(17): 2'-OMe-nucleotide
  modified_base (18)..(18): 2'-fluoro-nucleotide
  modified_base (19)..(19): 2'-OMe-nucleotide
  modified_base (20)..(20): dT
  modified_base (21)..(21): dT
gcucaguuggugcugcuuctt

SEQ ID NO: 1110 - DNA, 21 bp, Artificial Sequence
  source: /note="Description of Artificial Sequence: Synthetic oligonucleotide"
  source: /note="Description of Combined DNA/RNA Molecule: Synthetic oligonucleotide"
  modified_base (1)..(1): 2'-fluoro-nucleotide
  modified_base (2)..(2): 2'-fluoro-nucleotide
  modified_base (3)..(3): 2'-OMe-nucleotide
  modified_base (4)..(4): 2'-fluoro-nucleotide
  modified_base (5)..(5): 2'-OMe-nucleotide
  modified_base (6)..(6): 2'-fluoro-nucleotide
  modified_base (7)..(7): 2'-OMe-nucleotide
  modified_base (8)..(8): 2'-fluoro-nucleotide
  modified_base (9)..(9): 2'-OMe-nucleotide
  modified_base (10)..(10): 2'-fluoro-nucleotide
  modified_base (11)..(11): 2'-OMe-nucleotide
  modified_base (12)..(12): 2'-fluoro-nucleotide
  modified_base (13)..(13): 2'-OMe-nucleotide
  modified_base (14)..(14): 2'-fluoro-nucleotide
  modified_base (15)..(15): 2'-OMe-nucleotide
  modified_base (16)..(16): 2'-fluoro-nucleotide
  modified_base (17)..(17): 2'-OMe-nucleotide
  modified_base (18)..(18): 2'-fluoro-nucleotide
  modified_base (19)..(19): 2'-OMe-nucleotide
  modified_base (20)..(20): dT
  modified_base (21)..(21): dT
uuugcucaguuggugcugctt

SEQ ID NO: 1111 - DNA, 21 bp, Artificial Sequence
  source: /note="Description of Artificial Sequence: Synthetic oligonucleotide"
  source: /note="Description of Combined DNA/RNA Molecule: Synthetic oligonucleotide"
  modified_base (1)..(1): 2'-fluoro-nucleotide
  modified_base (2)..(2): 2'-fluoro-nucleotide
  modified_base (3)..(3): 2'-OMe-nucleotide
  modified_base (4)..(4): 2'-fluoro-nucleotide
  modified_base (5)..(5): 2'-OMe-nucleotide
  modified_base (6)..(6): 2'-fluoro-nucleotide
  modified_base (7)..(7): 2'-OMe-nucleotide
  modified_base (8)..(8): 2'-fluoro-nucleotide
  modified_base (9)..(9): 2'-OMe-nucleotide
  modified_base (10)..(10): 2'-fluoro-nucleotide
  modified_base (11)..(11): 2'-OMe-nucleotide
  modified_base (12)..(12): 2'-fluoro-nucleotide
  modified_base (13)..(13): 2'-OMe-nucleotide
  modified_base (14)..(14): 2'-fluoro-nucleotide
  modified_base (15)..(15): 2'-OMe-nucleotide
  modified_base (16)..(16): 2'-fluoro-nucleotide
  modified_base (17)..(17): 2'-OMe-nucleotide
  modified_base (18)..(18): 2'-fluoro-nucleotide
  modified_base (19)..(19): 2'-OMe-nucleotide
  modified_base (20)..(20): dT
  modified_base (21)..(21): dT
uaccaugguagcacugccgtt

SEQ ID NO: 1112 - DNA, 21 bp, Artificial Sequence
  source: /note="Description of Artificial Sequence: Synthetic oligonucleotide"
  source: /note="Description of Combined DNA/RNA Molecule: Synthetic oligonucleotide"
  modified_base (1)..(1): 2'-fluoro-nucleotide
  modified_base (2)..(2): 2'-fluoro-nucleotide
  modified_base (3)..(3): 2'-OMe-nucleotide
  modified_base (4)..(4): 2'-fluoro-nucleotide
  modified_base (5)..(5): 2'-OMe-nucleotide
  modified_base (6)..(6): 2'-fluoro-nucleotide
  modified_base (7)..(7): 2'-OMe-nucleotide
  modified_base (8)..(8): 2'-fluoro-nucleotide
  modified_base (9)..(9): 2'-OMe-nucleotide
  modified_base (10)..(10): 2'-fluoro-nucleotide
  modified_base (11)..(11): 2'-OMe-nucleotide
  modified_base (12)..(12): 2'-fluoro-nucleotide
  modified_base (13)..(13): 2'-OMe-nucleotide
  modified_base (14)..(14): 2'-fluoro-nucleotide
  modified_base (15)..(15): 2'-OMe-nucleotide
  modified_base (16)..(16): 2'-fluoro-nucleotide
  modified_base (17)..(17): 2'-OMe-nucleotide
  modified_base (18)..(18): 2'-fluoro-nucleotide
  modified_base (19)..(19): 2'-OMe-nucleotide
  modified_base (20)..(20): dT
  modified_base (21)..(21): dT
cauuaccaugguagcacugtt

SEQ ID NO: 1113 - DNA, 21 bp, Artificial Sequence
  source: /note="Description of Artificial Sequence: Synthetic oligonucleotide"
  source: /note="Description of Combined DNA/RNA Molecule: Synthetic oligonucleotide"
  modified_base (1)..(1): 2'-fluoro-nucleotide
  modified_base (2)..(2): 2'-fluoro-nucleotide
  modified_base (3)..(3): 2'-OMe-nucleotide
  modified_base (4)..(4): 2'-fluoro-nucleotide
  modified_base (5)..(5): 2'-OMe-nucleotide
  modified_base (6)..(6): 2'-fluoro-nucleotide
  modified_base (7)..(7): 2'-OMe-nucleotide
  modified_base (8)..(8): 2'-fluoro-nucleotide
  modified_base (9)..(9): 2'-OMe-nucleotide
  modified_base (10)..(10): 2'-fluoro-nucleotide
  modified_base (11)..(11): 2'-OMe-nucleotide
  modified_base (12)..(12): 2'-fluoro-nucleotide
  modified_base (13)..(13): 2'-OMe-nucleotide
  modified_base (14)..(14): 2'-fluoro-nucleotide
  modified_base (15)..(15): 2'-OMe-nucleotide
  modified_base (16)..(16): 2'-fluoro-nucleotide
  modified_base (17)..(17): 2'-OMe-nucleotide
  modified_base (18)..(18): 2'-fluoro-nucleotide
  modified_base (19)..(19): 2'-OMe-nucleotide
  modified_base (20)..(20): dT
  modified_base (21)..(21): dT
gccauuaccaugguagcactt

SEQ ID NO: 1114 - DNA, 21 bp, Artificial Sequence
  source: /note="Description of Artificial Sequence: Synthetic oligonucleotide"
  source: /note="Description of Combined DNA/RNA Molecule: Synthetic oligonucleotide"
  modified_base (1)..(1): 2'-fluoro-nucleotide
  modified_base (2)..(2): 2'-fluoro-nucleotide
  modified_base (3)..(3): 2'-OMe-nucleotide
  modified_base (4)..(4): 2'-fluoro-nucleotide
  modified_base (5)..(5): 2'-OMe-nucleotide
  modified_base (6)..(6): 2'-fluoro-nucleotide
  modified_base (7)..(7): 2'-OMe-nucleotide
  modified_base (8)..(8): 2'-fluoro-nucleotide
  modified_base (9)..(9): 2'-OMe-nucleotide
  modified_base (10)..(10): 2'-fluoro-nucleotide
  modified_base (11)..(11): 2'-OMe-nucleotide
  modified_base (12)..(12): 2'-fluoro-nucleotide
  modified_base (13)..(13): 2'-OMe-nucleotide
  modified_base (14)..(14): 2'-fluoro-nucleotide
  modified_base (15)..(15): 2'-OMe-nucleotide
  modified_base (16)..(16): 2'-fluoro-nucleotide
  modified_base (17)..(17): 2'-OMe-nucleotide
  modified_base (18)..(18): 2'-fluoro-nucleotide
  modified_base (19)..(19): 2'-OMe-nucleotide
  modified_base (20)..(20): dT
  modified_base (21)..(21): dT
aacucuggccauuaccaugtt

SEQ ID NO: 1115 - DNA, 21 bp, Artificial Sequence
  source: /note="Description of Artificial Sequence: Synthetic oligonucleotide"
  source: /note="Description of Combined DNA/RNA Molecule: Synthetic oligonucleotide"
  modified_base (1)..(1): 2'-fluoro-nucleotide
  modified_base (2)..(2): 2'-fluoro-nucleotide
  modified_base (3)..(3): 2'-OMe-nucleotide
  modified_base (4)..(4): 2'-fluoro-nucleotide
  modified_base (5)..(5): 2'-OMe-nucleotide
  modified_base (6)..(6): 2'-fluoro-nucleotide
  modified_base (7)..(7): 2'-OMe-nucleotide
  modified_base (8)..(8): 2'-fluoro-nucleotide
  modified_base (9)..(9): 2'-OMe-nucleotide
  modified_base (10)..(10): 2'-fluoro-nucleotide
  modified_base (11)..(11): 2'-OMe-nucleotide
  modified_base (12)..(12): 2'-fluoro-nucleotide
  modified_base (13)..(13): 2'-OMe-nucleotide
  modified_base (14)..(14): 2'-fluoro-nucleotide
  modified_base (15)..(15): 2'-OMe-nucleotide
  modified_base (16)..(16): 2'-fluoro-nucleotide
  modified_base (17)..(17): 2'-OMe-nucleotide
  modified_base (18)..(18): 2'-fluoro-nucleotide
  modified_base (19)..(19): 2'-OMe-nucleotide
  modified_base (20)..(20): dT
  modified_base (21)..(21): dT
gauaacucuggccauuacctt

SEQ ID NO: 1116 - DNA, 21 bp, Artificial Sequence
  source: /note="Description of Artificial Sequence: Synthetic oligonucleotide"
  source: /note="Description of Combined DNA/RNA Molecule: Synthetic oligonucleotide"
  modified_base (1)..(1): 2'-fluoro-nucleotide
  modified_base (2)..(2): 2'-fluoro-nucleotide
  modified_base (3)..(3): 2'-OMe-nucleotide
  modified_base (4)..(4): 2'-fluoro-nucleotide
  modified_base (5)..(5): 2'-OMe-nucleotide
  modified_base (6)..(6): 2'-fluoro-nucleotide
  modified_base (7)..(7): 2'-OMe-nucleotide
  modified_base (8)..(8): 2'-fluoro-nucleotide
  modified_base (9)..(9): 2'-OMe-nucleotide
  modified_base (10)..(10): 2'-fluoro-nucleotide
  modified_base (11)..(11): 2'-OMe-nucleotide
  modified_base (12)..(12): 2'-fluoro-nucleotide
  modified_base (13)..(13): 2'-OMe-nucleotide
  modified_base (14)..(14): 2'-fluoro-nucleotide
  modified_base (15)..(15): 2'-OMe-nucleotide
  modified_base (16)..(16): 2'-fluoro-nucleotide
  modified_base (17)..(17): 2'-OMe-nucleotide
  modified_base (18)..(18): 2'-fluoro-nucleotide
  modified_base (19)..(19): 2'-OMe-nucleotide
  modified_base (20)..(20): dT
  modified_base (21)..(21): dT
cgauaacucuggccauuactt

SEQ ID NO: 1117 - DNA, 21 bp, Artificial Sequence
  source: /note="Description of Artificial Sequence: Synthetic oligonucleotide"
  source: /note="Description of Combined DNA/RNA Molecule: Synthetic oligonucleotide"
  modified_base (1)..(1): 2'-fluoro-nucleotide
  modified_base (2)..(2): 2'-fluoro-nucleotide
  modified_base (3)..(3): 2'-OMe-nucleotide
  modified_base (4)..(4): 2'-fluoro-nucleotide
  modified_base (5)..(5): 2'-OMe-nucleotide
  modified_base (6)..(6): 2'-fluoro-nucleotide
  modified_base (7)..(7): 2'-OMe-nucleotide
  modified_base (8)..(8): 2'-fluoro-nucleotide
  modified_base (9)..(9): 2'-OMe-nucleotide
  modified_base (10)..(10): 2'-fluoro-nucleotide
  modified_base (11)..(11): 2'-OMe-nucleotide
  modified_base (12)..(12): 2'-fluoro-nucleotide
  modified_base (13)..(13): 2'-OMe-nucleotide
  modified_base (14)..(14): 2'-fluoro-nucleotide
  modified_base (15)..(15): 2'-OMe-nucleotide
  modified_base (16)..(16): 2'-fluoro-nucleotide
  modified_base (17)..(17): 2'-OMe-nucleotide
  modified_base (18)..(18): 2'-fluoro-nucleotide
  modified_base (19)..(19): 2'-OMe-nucleotide
  modified_base (20)..(20): dT
  modified_base (21)..(21): dT
ucgauaacucuggccauuatt

SEQ ID NO: 1118 - DNA, 21 bp, Artificial Sequence
  source: /note="Description of Artificial Sequence: Synthetic oligonucleotide"
  source: /note="Description of Combined DNA/RNA Molecule: Synthetic oligonucleotide"
  modified_base (1)..(1): 2'-fluoro-nucleotide
  modified_base (2)..(2): 2'-fluoro-nucleotide
  modified_base (3)..(3): 2'-OMe-nucleotide
  modified_base (4)..(4): 2'-fluoro-nucleotide
  modified_base (5)..(5): 2'-OMe-nucleotide
  modified_base (6)..(6): 2'-fluoro-nucleotide
  modified_base (7)..(7): 2'-OMe-nucleotide
  modified_base (8)..(8): 2'-fluoro-nucleotide
  modified_base (9)..(9): 2'-OMe-nucleotide
  modified_base (10)..(10): 2'-fluoro-nucleotide
  modified_base (11)..(11): 2'-OMe-nucleotide
  modified_base (12)..(12): 2'-fluoro-nucleotide
  modified_base (13)..(13): 2'-OMe-nucleotide
  modified_base (14)..(14): 2'-fluoro-nucleotide
  modified_base (15)..(15): 2'-OMe-nucleotide
  modified_base (16)..(16): 2'-fluoro-nucleotide
  modified_base (17)..(17): 2'-OMe-nucleotide
  modified_base (18)..(18): 2'-fluoro-nucleotide
  modified_base (19)..(19): 2'-OMe-nucleotide
  modified_base (20)..(20): dT
  modified_base (21)..(21): dT
gccucgauaacucuggccatt

SEQ ID NO: 1119 - DNA, 21 bp, Artificial Sequence
  source: /note="Description of Artificial Sequence: Synthetic oligonucleotide"
  source: /note="Description of Combined DNA/RNA Molecule: Synthetic oligonucleotide"
  modified_base (1)..(1): 2'-fluoro-nucleotide
  modified_base (2)..(2): 2'-fluoro-nucleotide
  modified_base (3)..(3): 2'-OMe-nucleotide
  modified_base (4)..(4): 2'-fluoro-nucleotide
  modified_base (5)..(5): 2'-OMe-nucleotide
  modified_base (6)..(6): 2'-fluoro-nucleotide
  modified_base (7)..(7): 2'-OMe-nucleotide
  modified_base (8)..(8): 2'-fluoro-nucleotide
  modified_base (9)..(9): 2'-OMe-nucleotide
  modified_base (10)..(10): 2'-fluoro-nucleotide
  modified_base (11)..(11): 2'-OMe-nucleotide
  modified_base (12)..(12): 2'-fluoro-nucleotide
  modified_base (13)..(13): 2'-OMe-nucleotide
  modified_base (14)..(14): 2'-fluoro-nucleotide
  modified_base (15)..(15): 2'-OMe-nucleotide
  modified_base (16)..(16): 2'-fluoro-nucleotide
  modified_base (17)..(17): 2'-OMe-nucleotide
  modified_base (18)..(18): 2'-fluoro-nucleotide
  modified_base (19)..(19): 2'-OMe-nucleotide
  modified_base (20)..(20): dT
  modified_base (21)..(21): dT
ugccucgauaacucuggcctt

SEQ ID NO: 1120 - DNA, 21 bp, Artificial Sequence
  source: /note="Description of Artificial Sequence: Synthetic oligonucleotide"
  source: /note="Description of Combined DNA/RNA Molecule: Synthetic oligonucleotide"
  modified_base (1)..(1): 2'-fluoro-nucleotide
  modified_base (2)..(2): 2'-fluoro-nucleotide
  modified_base (3)..(3): 2'-OMe-nucleotide
  modified_base (4)..(4): 2'-fluoro-nucleotide
  modified_base (5)..(5): 2'-OMe-nucleotide
  modified_base (6)..(6): 2'-fluoro-nucleotide
  modified_base (7)..(7): 2'-OMe-nucleotide
  modified_base (8)..(8): 2'-fluoro-nucleotide
  modified_base (9)..(9): 2'-OMe-nucleotide
  modified_base (10)..(10): 2'-fluoro-nucleotide
  modified_base (11)..(11): 2'-OMe-nucleotide
  modified_base (12)..(12): 2'-fluoro-nucleotide
  modified_base (13)..(13): 2'-OMe-nucleotide
  modified_base (14)..(14): 2'-fluoro-nucleotide
  modified_base (15)..(15): 2'-OMe-nucleotide
  modified_base (16)..(16): 2'-fluoro-nucleotide
  modified_base (17)..(17): 2'-OMe-nucleotide
  modified_base (18)..(18): 2'-fluoro-nucleotide
  modified_base (19)..(19): 2'-OMe-nucleotide
  modified_base (20)..(20): dT
  modified_base (21)..(21): dT
gugccucgauaacucuggctt

SEQ ID NO: 1121 - DNA, 21 bp, Artificial Sequence
  source: /note="Description of Artificial Sequence: Synthetic oligonucleotide"
  source: /note="Description of Combined DNA/RNA Molecule: Synthetic oligonucleotide"
  modified_base (1)..(1): 2'-fluoro-nucleotide
  modified_base (2)..(2): 2'-fluoro-nucleotide
  modified_base (3)..(3): 2'-OMe-nucleotide
  modified_base (4)..(4): 2'-fluoro-nucleotide
  modified_base (5)..(5): 2'-OMe-nucleotide
  modified_base (6)..(6): 2'-fluoro-nucleotide
  modified_base (7)..(7): 2'-OMe-nucleotide
  modified_base (8)..(8): 2'-fluoro-nucleotide
  modified_base (9)..(9): 2'-OMe-nucleotide
  modified_base (10)..(10): 2'-fluoro-nucleotide
  modified_base (11)..(11): 2'-OMe-nucleotide
  modified_base (12)..(12): 2'-fluoro-nucleotide
  modified_base (13)..(13): 2'-OMe-nucleotide
  modified_base (14)..(14): 2'-fluoro-nucleotide
  modified_base (15)..(15): 2'-OMe-nucleotide
  modified_base (16)..(16): 2'-fluoro-nucleotide
  modified_base (17)..(17): 2'-OMe-nucleotide
  modified_base (18)..(18): 2'-fluoro-nucleotide
  modified_base (19)..(19): 2'-OMe-nucleotide
  modified_base (20)..(20): dT
  modified_base (21)..(21): dT
ugugccucgauaacucuggtt

SEQ ID NO: 1122 - DNA, 21 bp, Artificial Sequence
  source: /note="Description of Artificial Sequence: Synthetic oligonucleotide"
  source: /note="Description of Combined DNA/RNA Molecule: Synthetic oligonucleotide"
  modified_base (1)..(1): 2'-fluoro-nucleotide
  modified_base (2)..(2): 2'-fluoro-nucleotide
  modified_base (3)..(3): 2'-OMe-nucleotide
  modified_base (4)..(4): 2'-fluoro-nucleotide
  modified_base (5)..(5): 2'-OMe-nucleotide
  modified_base (6)..(6): 2'-fluoro-nucleotide
  modified_base (7)..(7): 2'-OMe-nucleotide
  modified_base (8)..(8): 2'-fluoro-nucleotide
  modified_base (9)..(9): 2'-OMe-nucleotide
  modified_base (10)..(10): 2'-fluoro-nucleotide
  modified_base (11)..(11): 2'-OMe-nucleotide
  modified_base (12)..(12): 2'-fluoro-nucleotide
  modified_base (13)..(13): 2'-OMe-nucleotide
  modified_base (14)..(14): 2'-fluoro-nucleotide
  modified_base (15)..(15): 2'-OMe-nucleotide
  modified_base (16)..(16): 2'-fluoro-nucleotide
  modified_base (17)..(17): 2'-OMe-nucleotide
  modified_base (18)..(18): 2'-fluoro-nucleotide
  modified_base (19)..(19): 2'-OMe-nucleotide
  modified_base (20)..(20): dT
  modified_base (21)..(21): dT
aaugugccucgauaacucutt

SEQ ID NO: 1123 - DNA, 21 bp, Artificial Sequence
  source: /note="Description of Artificial Sequence: Synthetic oligonucleotide"
  source: /note="Description of Combined DNA/RNA Molecule: Synthetic oligonucleotide"
  modified_base (1)..(1): 2'-fluoro-nucleotide
  modified_base (2)..(2): 2'-fluoro-nucleotide
  modified_base (3)..(3): 2'-OMe-nucleotide
  modified_base (4)..(4): 2'-fluoro-nucleotide
  modified_base (5)..(5): 2'-OMe-nucleotide
  modified_base (6)..(6): 2'-fluoro-nucleotide
  modified_base (7)..(7): 2'-OMe-nucleotide
  modified_base (8)..(8): 2'-fluoro-nucleotide
  modified_base (9)..(9): 2'-OMe-nucleotide
  modified_base (10)..(10): 2'-fluoro-nucleotide
  modified_base (11)..(11): 2'-OMe-nucleotide
  modified_base (12)..(12): 2'-fluoro-nucleotide
  modified_base (13)..(13): 2'-OMe-nucleotide
  modified_base (14)..(14): 2'-fluoro-nucleotide
  modified_base (15)..(15): 2'-OMe-nucleotide
  modified_base (16)..(16): 2'-fluoro-nucleotide
  modified_base (17)..(17): 2'-OMe-nucleotide
  modified_base (18)..(18): 2'-fluoro-nucleotide
  modified_base (19)..(19): 2'-OMe-nucleotide
  modified_base (20)..(20): dT
  modified_base (21)..(21): dT
gaaugugccucgauaacuctt

SEQ ID NO: 1124 - DNA, 21 bp, Artificial Sequence
  source: /note="Description of Artificial Sequence: Synthetic oligonucleotide"
  source: /note="Description of Combined DNA/RNA Molecule: Synthetic oligonucleotide"
  modified_base (1)..(1): 2'-fluoro-nucleotide
  modified_base (2)..(2): 2'-fluoro-nucleotide
  modified_base (3)..(3): 2'-OMe-nucleotide
  modified_base (4)..(4): 2'-fluoro-nucleotide
  modified_base (5)..(5): 2'-OMe-nucleotide
  modified_base (6)..(6): 2'-fluoro-nucleotide
  modified_base (7)..(7): 2'-OMe-nucleotide
  modified_base (8)..(8): 2'-fluoro-nucleotide
  modified_base (9)..(9): 2'-OMe-nucleotide
  modified_base (10)..(10): 2'-fluoro-nucleotide
  modified_base (11)..(11): 2'-OMe-nucleotide
  modified_base (12)..(12): 2'-fluoro-nucleotide
  modified_base (13)..(13): 2'-OMe-nucleotide
  modified_base (14)..(14): 2'-fluoro-nucleotide
  modified_base (15)..(15): 2'-OMe-nucleotide
  modified_base (16)..(16): 2'-fluoro-nucleotide
  modified_base (17)..(17): 2'-OMe-nucleotide
  modified_base (18)..(18): 2'-fluoro-nucleotide
  modified_base (19)..(19): 2'-OMe-nucleotide
  modified_base (20)..(20): dT
  modified_base (21)..(21): dT
agaaugugccucgauaacutt

SEQ ID NO: 1125 - DNA, 21 bp, Artificial Sequence
  source: /note="Description of Artificial Sequence: Synthetic oligonucleotide"
  source: /note="Description of Combined DNA/RNA Molecule: Synthetic oligonucleotide"
  modified_base (1)..(1): 2'-fluoro-nucleotide
  modified_base (2)..(2): 2'-fluoro-nucleotide
  modified_base (3)..(3): 2'-OMe-nucleotide
  modified_base (4)..(4): 2'-fluoro-nucleotide
  modified_base (5)..(5): 2'-OMe-nucleotide
  modified_base (6)..(6): 2'-fluoro-nucleotide
  modified_base (7)..(7): 2'-OMe-nucleotide
  modified_base (8)..(8): 2'-fluoro-nucleotide
  modified_base (9)..(9): 2'-OMe-nucleotide
  modified_base (10)..(10): 2'-fluoro-nucleotide
  modified_base (11)..(11): 2'-OMe-nucleotide
  modified_base (12)..(12): 2'-fluoro-nucleotide
  modified_base (13)..(13): 2'-OMe-nucleotide
  modified_base (14)..(14): 2'-fluoro-nucleotide
  modified_base (15)..(15): 2'-OMe-nucleotide
  modified_base (16)..(16): 2'-fluoro-nucleotide
  modified_base (17)..(17): 2'-OMe-nucleotide
  modified_base (18)..(18): 2'-fluoro-nucleotide
  modified_base (19)..(19): 2'-OMe-nucleotide
  modified_base (20)..(20): dT
  modified_base (21)..(21): dT
acagugguggagaaugugctt

SEQ ID NO: 1126 - DNA, 21 bp, Artificial Sequence
  source: /note="Description of Artificial Sequence: Synthetic oligonucleotide"
  source: /note="Description of Combined DNA/RNA Molecule: Synthetic oligonucleotide"
  modified_base (1)..(1): 2'-fluoro-nucleotide
  modified_base (2)..(2): 2'-fluoro-nucleotide
  modified_base (3)..(3): 2'-OMe-nucleotide
  modified_base (4)..(4): 2'-fluoro-nucleotide
  modified_base (5)..(5): 2'-OMe-nucleotide
  modified_base (6)..(6): 2'-fluoro-nucleotide
  modified_base (7)..(7): 2'-OMe-nucleotide
  modified_base (8)..(8): 2'-fluoro-nucleotide
  modified_base (9)..(9): 2'-OMe-nucleotide
  modified_base (10)..(10): 2'-fluoro-nucleotide
  modified_base (11)..(11): 2'-OMe-nucleotide
  modified_base (12)..(12): 2'-fluoro-nucleotide
  modified_base (13)..(13): 2'-OMe-nucleotide
  modified_base (14)..(14): 2'-fluoro-nucleotide
  modified_base (15)..(15): 2'-OMe-nucleotide
  modified_base (16)..(16): 2'-fluoro-nucleotide
  modified_base (17)..(17): 2'-OMe-nucleotide
  modified_base (18)..(18): 2'-fluoro-nucleotide
  modified_base (19)..(19): 2'-OMe-nucleotide
  modified_base (20)..(20): dT
  modified_base (21)..(21): dT
ugugacagugguggagaautt

SEQ ID NO: 1127 - DNA, 21 bp, Artificial Sequence
  source: /note="Description of Artificial Sequence: Synthetic oligonucleotide"
  source: /note="Description of Combined DNA/RNA Molecule: Synthetic oligonucleotide"
  modified_base (1)..(1): 2'-fluoro-nucleotide
  modified_base (2)..(2): 2'-fluoro-nucleotide
  modified_base (3)..(3): 2'-OMe-nucleotide
  modified_base (4)..(4): 2'-fluoro-nucleotide
  modified_base (5)..(5): 2'-OMe-nucleotide
  modified_base (6)..(6): 2'-fluoro-nucleotide
  modified_base (7)..(7): 2'-OMe-nucleotide
  modified_base (8)..(8): 2'-fluoro-nucleotide
  modified_base (9)..(9): 2'-OMe-nucleotide
  modified_base (10)..(10): 2'-fluoro-nucleotide
  modified_base (11)..(11): 2'-OMe-nucleotide
  modified_base (12)..(12): 2'-fluoro-nucleotide
  modified_base (13)..(13): 2'-OMe-nucleotide
  modified_base (14)..(14): 2'-fluoro-nucleotide
  modified_base (15)..(15): 2'-OMe-nucleotide
  modified_base (16)..(16): 2'-fluoro-nucleotide
  modified_base (17)..(17): 2'-OMe-nucleotide
  modified_base (18)..(18): 2'-fluoro-nucleotide
  modified_base (19)..(19): 2'-OMe-nucleotide
  modified_base (20)..(20): dT
  modified_base (21)..(21): dT
uugacauguccuuccugugtt

SEQ ID NO: 1128 - DNA, 21 bp, Artificial Sequence
  source: /note="Description of Artificial Sequence: Synthetic oligonucleotide"
  source: /note="Description of Combined DNA/RNA Molecule: Synthetic oligonucleotide"
  modified_base (1)..(1): 2'-fluoro-nucleotide
  modified_base (2)..(2): 2'-fluoro-nucleotide
  modified_base (3)..(3): 2'-OMe-nucleotide
  modified_base (4)..(4): 2'-fluoro-nucleotide
  modified_base (5)..(5): 2'-OMe-nucleotide
  modified_base (6)..(6): 2'-fluoro-nucleotide
  modified_base (7)..(7): 2'-OMe-nucleotide
  modified_base (8)..(8): 2'-fluoro-nucleotide
  modified_base (9)..(9): 2'-OMe-nucleotide
  modified_base (10)..(10): 2'-fluoro-nucleotide
  modified_base (11)..(11): 2'-OMe-nucleotide
  modified_base (12)..(12): 2'-fluoro-nucleotide
  modified_base (13)..(13): 2'-OMe-nucleotide
  modified_base (14)..(14): 2'-fluoro-nucleotide
  modified_base (15)..(15): 2'-OMe-nucleotide
  modified_base (16)..(16): 2'-fluoro-nucleotide
  modified_base (17)..(17): 2'-OMe-nucleotide
  modified_base (18)..(18): 2'-fluoro-nucleotide
  modified_base (19)..(19): 2'-OMe-nucleotide
  modified_base (20)..(20): dT
  modified_base (21)..(21): dT
caagauugacauguccuuctt

SEQ ID NO: 1129 - DNA, 21 bp, Artificial Sequence
  source: /note="Description of Artificial Sequence: Synthetic oligonucleotide"
  source: /note="Description of Combined DNA/RNA Molecule: Synthetic oligonucleotide"
  modified_base (1)..(1): 2'-fluoro-nucleotide
  modified_base (2)..(2): 2'-fluoro-nucleotide
  modified_base (3)..(3): 2'-OMe-nucleotide
  modified_base (4)..(4): 2'-fluoro-nucleotide
  modified_base (5)..(5): 2'-OMe-nucleotide
  modified_base (6)..(6): 2'-fluoro-nucleotide
  modified_base (7)..(7): 2'-OMe-nucleotide
  modified_base (8)..(8): 2'-fluoro-nucleotide
  modified_base (9)..(9): 2'-OMe-nucleotide
  modified_base (10)..(10): 2'-fluoro-nucleotide
  modified_base (11)..(11): 2'-OMe-nucleotide
  modified_base (12)..(12): 2'-fluoro-nucleotide
  modified_base (13)..(13): 2'-OMe-nucleotide
  modified_base (14)..(14): 2'-fluoro-nucleotide
  modified_base (15)..(15): 2'-OMe-nucleotide
  modified_base (16)..(16): 2'-fluoro-nucleotide
  modified_base (17)..(17): 2'-OMe-nucleotide
  modified_base (18)..(18): 2'-fluoro-nucleotide
  modified_base (19)..(19): 2'-OMe-nucleotide
  modified_base (20)..(20): dT
  modified_base (21)..(21): dT
ugcugggguccaugguaaatt

SEQ ID NO: 1130 - DNA, 21 bp, Artificial Sequence
  source: /note="Description of Artificial Sequence: Synthetic oligonucleotide"
  source: /note="Description of Combined DNA/RNA Molecule: Synthetic oligonucleotide"
  modified_base (1)..(1): 2'-fluoro-nucleotide
  modified_base (2)..(2): 2'-fluoro-nucleotide
  modified_base (3)..(3): 2'-OMe-nucleotide
  modified_base (4)..(4): 2'-fluoro-nucleotide
  modified_base (5)..(5): 2'-OMe-nucleotide
  modified_base (6)..(6): 2'-fluoro-nucleotide
  modified_base (7)..(7): 2'-OMe-nucleotide
  modified_base (8)..(8): 2'-fluoro-nucleotide
  modified_base (9)..(9): 2'-OMe-nucleotide
  modified_base (10)..(10): 2'-fluoro-nucleotide
  modified_base (11)..(11): 2'-OMe-nucleotide
  modified_base (12)..(12): 2'-fluoro-nucleotide
  modified_base (13)..(13): 2'-OMe-nucleotide
  modified_base (14)..(14): 2'-fluoro-nucleotide
  modified_base (15)..(15): 2'-OMe-nucleotide
  modified_base (16)..(16): 2'-fluoro-nucleotide
  modified_base (17)..(17): 2'-OMe-nucleotide
  modified_base (18)..(18): 2'-fluoro-nucleotide
  modified_base (19)..(19): 2'-OMe-nucleotide
  modified_base (20)..(20): dT
  modified_base (21)..(21): dT
augcugggguccaugguaatt

SEQ ID NO: 1131 - DNA, 21 bp, Artificial Sequence
  source: /note="Description of Artificial Sequence: Synthetic oligonucleotide"
  source: /note="Description of Combined DNA/RNA Molecule: Synthetic oligonucleotide"
  modified_base (1)..(1): 2'-fluoro-nucleotide
  modified_base (2)..(2): 2'-fluoro-nucleotide
  modified_base (3)..(3): 2'-OMe-nucleotide
  modified_base (4)..(4): 2'-fluoro-nucleotide
  modified_base (5)..(5): 2'-OMe-nucleotide
  modified_base (6)..(6): 2'-fluoro-nucleotide
  modified_base (7)..(7): 2'-OMe-nucleotide
  modified_base (8)..(8): 2'-fluoro-nucleotide
  modified_base (9)..(9): 2'-OMe-nucleotide
  modified_base (10)..(10): 2'-fluoro-nucleotide
  modified_base (11)..(11): 2'-OMe-nucleotide
  modified_base (12)..(12): 2'-fluoro-nucleotide
  modified_base (13)..(13): 2'-OMe-nucleotide
  modified_base (14)..(14): 2'-fluoro-nucleotide
  modified_base (15)..(15): 2'-OMe-nucleotide
  modified_base (16)..(16): 2'-fluoro-nucleotide
  modified_base (17)..(17): 2'-OMe-nucleotide
  modified_base (18)..(18): 2'-fluoro-nucleotide
  modified_base (19)..(19): 2'-OMe-nucleotide
  modified_base (20)..(20): dT
  modified_base (21)..(21): dT
caucgcgucagguugcagutt

SEQ ID NO: 1132 - DNA, 21 bp, Artificial Sequence
  source: /note="Description of Artificial Sequence: Synthetic oligonucleotide"
  source: /note="Description of Combined DNA/RNA Molecule: Synthetic oligonucleotide"
  modified_base (1)..(1): 2'-fluoro-nucleotide
  modified_base (2)..(2): 2'-fluoro-nucleotide
  modified_base (3)..(3): 2'-OMe-nucleotide
  modified_base (4)..(4): 2'-fluoro-nucleotide
  modified_base (5)..(5): 2'-OMe-nucleotide
  modified_base (6)..(6): 2'-fluoro-nucleotide
  modified_base (7)..(7): 2'-OMe-nucleotide
  modified_base (8)..(8): 2'-fluoro-nucleotide
  modified_base (9)..(9): 2'-OMe-nucleotide
  modified_base (10)..(10): 2'-fluoro-nucleotide
  modified_base (11)..(11): 2'-OMe-nucleotide
  modified_base (12)..(12): 2'-fluoro-nucleotide
  modified_base (13)..(13): 2'-OMe-nucleotide
  modified_base (14)..(14): 2'-fluoro-nucleotide
  modified_base (15)..(15): 2'-OMe-nucleotide
  modified_base (16)..(16): 2'-fluoro-nucleotide
  modified_base (17)..(17): 2'-OMe-nucleotide
  modified_base (18)..(18): 2'-fluoro-nucleotide
  modified_base (19)..(19): 2'-OMe-nucleotide
  modified_base (20)..(20): dT
  modified_base (21)..(21): dT
ucugagcaucgcgucaggutt

SEQ ID NO: 1133 - DNA, 21 bp, Artificial Sequence
  source: /note="Description of Artificial Sequence: Synthetic oligonucleotide"
  source: /note="Description of Combined DNA/RNA Molecule: Synthetic oligonucleotide"
  modified_base (1)..(1): 2'-fluoro-nucleotide
  modified_base (2)..(2): 2'-fluoro-nucleotide
  modified_base (3)..(3): 2'-OMe-nucleotide
  modified_base (4)..(4): 2'-fluoro-nucleotide
  modified_base (5)..(5): 2'-OMe-nucleotide
  modified_base (6)..(6): 2'-fluoro-nucleotide
  modified_base (7)..(7): 2'-OMe-nucleotide
  modified_base (8)..(8): 2'-fluoro-nucleotide
  modified_base (9)..(9): 2'-OMe-nucleotide
  modified_base (10)..(10): 2'-fluoro-nucleotide
  modified_base (11)..(11): 2'-OMe-nucleotide
  modified_base (12)..(12): 2'-fluoro-nucleotide
  modified_base (13)..(13): 2'-OMe-nucleotide
  modified_base (14)..(14): 2'-fluoro-nucleotide
  modified_base (15)..(15): 2'-OMe-nucleotide
  modified_base (16)..(16): 2'-fluoro-nucleotide
  modified_base (17)..(17): 2'-OMe-nucleotide
  modified_base (18)..(18): 2'-fluoro-nucleotide
  modified_base (19)..(19): 2'-OMe-nucleotide
  modified_base (20)..(20): dT
  modified_base (21)..(21): dT
gugucugagcaucgcgucatt

SEQ ID NO: 1134 - DNA, 21 bp, Artificial Sequence
  source: /note="Description of Artificial Sequence: Synthetic oligonucleotide"
  source: /note="Description of Combined DNA/RNA Molecule: Synthetic oligonucleotide"
  modified_base (1)..(1): 2'-fluoro-nucleotide
  modified_base (2)..(2): 2'-fluoro-nucleotide
  modified_base (3)..(3): 2'-OMe-nucleotide
  modified_base (4)..(4): 2'-fluoro-nucleotide
  modified_base (5)..(5): 2'-OMe-nucleotide
  modified_base (6)..(6): 2'-fluoro-nucleotide
  modified_base (7)..(7): 2'-OMe-nucleotide
  modified_base (8)..(8): 2'-fluoro-nucleotide
  modified_base (9)..(9): 2'-OMe-nucleotide
  modified_base (10)..(10): 2'-fluoro-nucleotide
  modified_base (11)..(11): 2'-OMe-nucleotide
  modified_base (12)..(12): 2'-fluoro-nucleotide
  modified_base (13)..(13): 2'-OMe-nucleotide
  modified_base (14)..(14): 2'-fluoro-nucleotide
  modified_base (15)..(15): 2'-OMe-nucleotide
  modified_base (16)..(16): 2'-fluoro-nucleotide
  modified_base (17)..(17): 2'-OMe-nucleotide
  modified_base (18)..(18): 2'-fluoro-nucleotide
  modified_base (19)..(19): 2'-OMe-nucleotide
  modified_base (20)..(20): dT
  modified_base (21)..(21): dT
ugugucugagcaucgcguctt

SEQ ID NO: 1135 - DNA, 21 bp, Artificial Sequence
  source: /note="Description of Artificial Sequence: Synthetic oligonucleotide"
  source: /note="Description of Combined DNA/RNA Molecule: Synthetic oligonucleotide"
  modified_base (1)..(1): 2'-fluoro-nucleotide
  modified_base (2)..(2): 2'-fluoro-nucleotide
  modified_base (3)..(3): 2'-OMe-nucleotide
  modified_base (4)..(4): 2'-fluoro-nucleotide
  modified_base (5)..(5): 2'-OMe-nucleotide
  modified_base (6)..(6): 2'-fluoro-nucleotide
  modified_base (7)..(7): 2'-OMe-nucleotide
  modified_base (8)..(8): 2'-fluoro-nucleotide
  modified_base (9)..(9): 2'-OMe-nucleotide
  modified_base (10)..(10): 2'-fluoro-nucleotide
  modified_base (11)..(11): 2'-OMe-nucleotide
  modified_base (12)..(12): 2'-fluoro-nucleotide
  modified_base (13)..(13): 2'-OMe-nucleotide
  modified_base (14)..(14): 2'-fluoro-nucleotide
  modified_base (15)..(15): 2'-OMe-nucleotide
  modified_base (16)..(16): 2'-fluoro-nucleotide
  modified_base (17)..(17): 2'-OMe-nucleotide
  modified_base (18)..(18): 2'-fluoro-nucleotide
  modified_base (19)..(19): 2'-OMe-nucleotide
  modified_base (20)..(20): dT
  modified_base (21)..(21): dT
cugugucugagcaucgcgutt

SEQ ID NO: 1136 - DNA, 21 bp, Artificial Sequence
  source: /note="Description of Artificial Sequence: Synthetic oligonucleotide"
  source: /note="Description of Combined DNA/RNA Molecule: Synthetic oligonucleotide"
  modified_base (1)..(1): 2'-fluoro-nucleotide
  modified_base (2)..(2): 2'-fluoro-nucleotide
  modified_base (3)..(3): 2'-OMe-nucleotide
  modified_base (4)..(4): 2'-fluoro-nucleotide
  modified_base (5)..(5): 2'-OMe-nucleotide
  modified_base (6)..(6): 2'-fluoro-nucleotide
  modified_base (7)..(7): 2'-OMe-nucleotide
  modified_base (8)..(8): 2'-fluoro-nucleotide
  modified_base (9)..(9): 2'-OMe-nucleotide
  modified_base (10)..(10): 2'-fluoro-nucleotide
  modified_base (11)..(11): 2'-OMe-nucleotide
  modified_base (12)..(12): 2'-fluoro-nucleotide
  modified_base (13)..(13): 2'-OMe-nucleotide
  modified_base (14)..(14): 2'-fluoro-nucleotide
  modified_base (15)..(15): 2'-OMe-nucleotide
  modified_base (16)..(16): 2'-fluoro-nucleotide
  modified_base (17)..(17): 2'-OMe-nucleotide
  modified_base (18)..(18): 2'-fluoro-nucleotide
  modified_base (19)..(19): 2'-OMe-nucleotide
  modified_base (20)..(20): dT
  modified_base (21)..(21): dT
ucugugucugagcaucgcgtt

SEQ ID NO: 1137 - DNA, 21 bp, Artificial Sequence
  source: /note="Description of Artificial Sequence: Synthetic oligonucleotide"
  source: /note="Description of Combined DNA/RNA Molecule: Synthetic oligonucleotide"
  modified_base (1)..(1): 2'-fluoro-nucleotide
  modified_base (2)..(2): 2'-fluoro-nucleotide
  modified_base (3)..(3): 2'-OMe-nucleotide
  modified_base (4)..(4): 2'-fluoro-nucleotide
  modified_base (5)..(5): 2'-OMe-nucleotide
  modified_base (6)..(6): 2'-fluoro-nucleotide
  modified_base (7)..(7): 2'-OMe-nucleotide
  modified_base (8)..(8): 2'-fluoro-nucleotide
  modified_base (9)..(9): 2'-OMe-nucleotide
  modified_base (10)..(10): 2'-fluoro-nucleotide
  modified_base (11)..(11): 2'-OMe-nucleotide
  modified_base (12)..(12): 2'-fluoro-nucleotide
  modified_base (13)..(13): 2'-OMe-nucleotide
  modified_base (14)..(14): 2'-fluoro-nucleotide
  modified_base (15)..(15): 2'-OMe-nucleotide
  modified_base (16)..(16): 2'-fluoro-nucleotide
  modified_base (17)..(17): 2'-OMe-nucleotide
  modified_base (18)..(18): 2'-fluoro-nucleotide
  modified_base (19)..(19): 2'-OMe-nucleotide
  modified_base (20)..(20): dT
  modified_base (21)..(21): dT
gagauucgagguucacuuctt

SEQ ID NO: 1138 - DNA, 21 bp, Artificial Sequence
  source: /note="Description of Artificial Sequence: Synthetic oligonucleotide"
  source: /note="Description of Combined DNA/RNA Molecule: Synthetic oligonucleotide"
  modified_base (1)..(1): 2'-fluoro-nucleotide
  modified_base (2)..(2): 2'-fluoro-nucleotide
  modified_base (3)..(3): 2'-OMe-nucleotide
  modified_base (4)..(4): 2'-fluoro-nucleotide
  modified_base (5)..(5): 2'-OMe-nucleotide
  modified_base (6)..(6): 2'-fluoro-nucleotide
  modified_base (7)..(7): 2'-OMe-nucleotide
  modified_base (8)..(8): 2'-fluoro-nucleotide
  modified_base (9)..(9): 2'-OMe-nucleotide
  modified_base (10)..(10): 2'-fluoro-nucleotide
  modified_base (11)..(11): 2'-OMe-nucleotide
  modified_base (12)..(12): 2'-fluoro-nucleotide
  modified_base (13)..(13): 2'-OMe-nucleotide
  modified_base (14)..(14): 2'-fluoro-nucleotide
  modified_base (15)..(15): 2'-OMe-nucleotide
  modified_base (16)..(16): 2'-fluoro-nucleotide
  modified_base (17)..(17): 2'-OMe-nucleotide
  modified_base (18)..(18): 2'-fluoro-nucleotide
  modified_base (19)..(19): 2'-OMe-nucleotide
  modified_base (20)..(20): dT
  modified_base (21)..(21): dT
gauguaacauucaguccugtt

SEQ ID NO: 1139 - DNA, 21 bp, Artificial Sequence
  source: /note="Description of Artificial Sequence: Synthetic oligonucleotide"
  source: /note="Description of Combined DNA/RNA Molecule: Synthetic oligonucleotide"
  modified_base (1)..(1): 2'-fluoro-nucleotide
  modified_base (2)..(2): 2'-fluoro-nucleotide
  modified_base (3)..(3): 2'-OMe-nucleotide
  modified_base (4)..(4): 2'-fluoro-nucleotide
  modified_base (5)..(5): 2'-OMe-nucleotide
  modified_base (6)..(6): 2'-fluoro-nucleotide
  modified_base (7)..(7): 2'-OMe-nucleotide
  modified_base (8)..(8): 2'-fluoro-nucleotide
  modified_base (9)..(9): 2'-OMe-nucleotide
  modified_base (10)..(10): 2'-fluoro-nucleotide
  modified_base (11)..(11): 2'-OMe-nucleotide
  modified_base (12)..(12): 2'-fluoro-nucleotide
  modified_base (13)..(13): 2'-OMe-nucleotide
  modified_base (14)..(14): 2'-fluoro-nucleotide
  modified_base (15)..(15): 2'-OMe-nucleotide
  modified_base (16)..(16): 2'-fluoro-nucleotide
  modified_base (17)..(17): 2'-OMe-nucleotide
  modified_base (18)..(18): 2'-fluoro-nucleotide
  modified_base (19)..(19): 2'-OMe-nucleotide
  modified_base (20)..(20): dT
  modified_base (21)..(21): dT
ucccaaagguaccuugggutt

SEQ ID NO: 1140 - DNA, 21 bp, Artificial Sequence
  source: /note="Description of Artificial Sequence: Synthetic oligonucleotide"
  source: /note="Description of Combined DNA/RNA Molecule: Synthetic oligonucleotide"
  modified_base (1)..(1): 2'-fluoro-nucleotide
  modified_base (2)..(2): 2'-fluoro-nucleotide
  modified_base (3)..(3): 2'-OMe-nucleotide
  modified_base (4)..(4): 2'-fluoro-nucleotide
  modified_base (5)..(5): 2'-OMe-nucleotide
  modified_base (6)..(6): 2'-fluoro-nucleotide
  modified_base (7)..(7): 2'-OMe-nucleotide
  modified_base (8)..(8): 2'-fluoro-nucleotide
  modified_base (9)..(9): 2'-OMe-nucleotide
  modified_base (10)..(10): 2'-fluoro-nucleotide
  modified_base (11)..(11): 2'-OMe-nucleotide
  modified_base (12)..(12): 2'-fluoro-nucleotide
  modified_base (13)..(13): 2'-OMe-nucleotide
  modified_base (14)..(14): 2'-fluoro-nucleotide
  modified_base (15)..(15): 2'-OMe-nucleotide
  modified_base (16)..(16): 2'-fluoro-nucleotide
  modified_base (17)..(17): 2'-OMe-nucleotide
  modified_base (18)..(18): 2'-fluoro-nucleotide
  modified_base (19)..(19): 2'-OMe-nucleotide
  modified_base (20)..(20): dT
  modified_base (21)..(21): dT
gucccaaagguaccuugggtt

SEQ ID NO: 1141 - DNA, 21 bp, Artificial Sequence
  source: /note="Description of Artificial Sequence: Synthetic oligonucleotide"
  source: /note="Description of Combined DNA/RNA Molecule: Synthetic oligonucleotide"
  modified_base (1)..(1): 2'-fluoro-nucleotide
  modified_base (2)..(2): 2'-fluoro-nucleotide
  modified_base (3)..(3): 2'-OMe-nucleotide
  modified_base (4)..(4): 2'-fluoro-nucleotide
  modified_base (5)..(5): 2'-OMe-nucleotide
  modified_base (6)..(6): 2'-fluoro-nucleotide
  modified_base (7)..(7): 2'-OMe-nucleotide
  modified_base (8)..(8): 2'-fluoro-nucleotide
  modified_base (9)..(9): 2'-OMe-nucleotide
  modified_base (10)..(10): 2'-fluoro-nucleotide
  modified_base (11)..(11): 2'-OMe-nucleotide
  modified_base (12)..(12): 2'-fluoro-nucleotide
  modified_base (13)..(13): 2'-OMe-nucleotide
  modified_base (14)..(14): 2'-fluoro-nucleotide
  modified_base (15)..(15): 2'-OMe-nucleotide
  modified_base (16)..(16): 2'-fluoro-nucleotide
  modified_base (17)..(17): 2'-OMe-nucleotide
  modified_base (18)..(18): 2'-fluoro-nucleotide
  modified_base (19)..(19): 2'-OMe-nucleotide
  modified_base (20)..(20): dT
  modified_base (21)..(21): dT
aaggccagucccaaagguatt

SEQ ID NO: 1142 - DNA, 21 bp, Artificial Sequence
  source: /note="Description of Artificial Sequence: Synthetic oligonucleotide"
  source: /note="Description of Combined DNA/RNA Molecule: Synthetic oligonucleotide"
  modified_base (1)..(1): 2'-fluoro-nucleotide
  modified_base (2)..(2): 2'-fluoro-nucleotide
  modified_base (3)..(3): 2'-OMe-nucleotide
  modified_base (4)..(4): 2'-fluoro-nucleotide
  modified_base (5)..(5): 2'-OMe-nucleotide
  modified_base (6)..(6): 2'-fluoro-nucleotide
  modified_base (7)..(7): 2'-OMe-nucleotide
  modified_base (8)..(8): 2'-fluoro-nucleotide
  modified_base (9)..(9): 2'-OMe-nucleotide
  modified_base (10)..(10): 2'-fluoro-nucleotide
  modified_base (11)..(11): 2'-OMe-nucleotide
  modified_base (12)..(12): 2'-fluoro-nucleotide
  modified_base (13)..(13): 2'-OMe-nucleotide
  modified_base (14)..(14): 2'-fluoro-nucleotide
  modified_base (15)..(15): 2'-OMe-nucleotide
  modified_base (16)..(16): 2'-fluoro-nucleotide
  modified_base (17)..(17): 2'-OMe-nucleotide
  modified_base (18)..(18): 2'-fluoro-nucleotide
  modified_base (19)..(19): 2'-OMe-nucleotide
  modified_base (20)..(20): dT
  modified_base (21)..(21): dT
gaaggccagucccaaaggutt

SEQ ID NO: 1143 - DNA, 21 bp, Artificial Sequence
  source: /note="Description of Artificial Sequence: Synthetic oligonucleotide"
  source: /note="Description of Combined DNA/RNA Molecule: Synthetic oligonucleotide"
  modified_base (1)..(1): 2'-fluoro-nucleotide
  modified_base (2)..(2): 2'-fluoro-nucleotide
  modified_base (3)..(3): 2'-OMe-nucleotide
  modified_base (4)..(4): 2'-fluoro-nucleotide
  modified_base (5)..(5): 2'-OMe-nucleotide
  modified_base (6)..(6): 2'-fluoro-nucleotide
  modified_base (7)..(7): 2'-OMe-nucleotide
  modified_base (8)..(8): 2'-fluoro-nucleotide
  modified_base (9)..(9): 2'-OMe-nucleotide
  modified_base (10)..(10): 2'-fluoro-nucleotide
  modified_base (11)..(11): 2'-OMe-nucleotide
  modified_base (12)..(12): 2'-fluoro-nucleotide
  modified_base (13)..(13): 2'-OMe-nucleotide
  modified_base (14)..(14): 2'-fluoro-nucleotide
  modified_base (15)..(15): 2'-OMe-nucleotide
  modified_base (16)..(16): 2'-fluoro-nucleotide
  modified_base (17)..(17): 2'-OMe-nucleotide
  modified_base (18)..(18): 2'-fluoro-nucleotide
  modified_base (19)..(19): 2'-OMe-nucleotide
  modified_base (20)..(20): dT
  modified_base (21)..(21): dT
ucuucguuugauugcuguctt

SEQ ID NO: 1144 - DNA, 21 bp, Artificial Sequence
  source: /note="Description of Artificial Sequence: Synthetic oligonucleotide"
  source: /note="Description of Combined DNA/RNA Molecule: Synthetic oligonucleotide"
  modified_base (1)..(1): 2'-fluoro-nucleotide
  modified_base (2)..(2): 2'-fluoro-nucleotide
  modified_base (3)..(3): 2'-OMe-nucleotide
  modified_base (4)..(4): 2'-fluoro-nucleotide
  modified_base (5)..(5): 2'-OMe-nucleotide
  modified_base (6)..(6): 2'-fluoro-nucleotide
  modified_base (7)..(7): 2'-OMe-nucleotide
  modified_base (8)..(8): 2'-fluoro-nucleotide
  modified_base (9)..(9): 2'-OMe-nucleotide
  modified_base (10)..(10): 2'-fluoro-nucleotide
  modified_base (11)..(11): 2'-OMe-nucleotide
  modified_base (12)..(12): 2'-fluoro-nucleotide
  modified_base (13)..(13): 2'-OMe-nucleotide
  modified_base (14)..(14): 2'-fluoro-nucleotide
  modified_base (15)..(15): 2'-OMe-nucleotide
  modified_base (16)..(16): 2'-fluoro-nucleotide
  modified_base (17)..(17): 2'-OMe-nucleotide
  modified_base (18)..(18): 2'-fluoro-nucleotide
  modified_base (19)..(19): 2'-OMe-nucleotide
  modified_base (20)..(20): dT
  modified_base (21)..(21): dT
gucuucguuugauugcugutt

SEQ ID NO: 1145 - DNA, 21 bp, Artificial Sequence
  source: /note="Description of Artificial Sequence: Synthetic oligonucleotide"
  source: /note="Description of Combined DNA/RNA Molecule: Synthetic oligonucleotide"
  modified_base (1)..(1): 2'-fluoro-nucleotide
  modified_base (2)..(2): 2'-fluoro-nucleotide
  modified_base (3)..(3): 2'-OMe-nucleotide
  modified_base (4)..(4): 2'-fluoro-nucleotide
  modified_base (5)..(5): 2'-OMe-nucleotide
  modified_base (6)..(6): 2'-fluoro-nucleotide
  modified_base (7)..(7): 2'-OMe-nucleotide
  modified_base (8)..(8): 2'-fluoro-nucleotide
  modified_base (9)..(9): 2'-OMe-nucleotide
  modified_base (10)..(10): 2'-fluoro-nucleotide
  modified_base (11)..(11): 2'-OMe-nucleotide
  modified_base (12)..(12): 2'-fluoro-nucleotide
  modified_base (13)..(13): 2'-OMe-nucleotide
  modified_base (14)..(14): 2'-fluoro-nucleotide
  modified_base (15)..(15): 2'-OMe-nucleotide
  modified_base (16)..(16): 2'-fluoro-nucleotide
  modified_base (17)..(17): 2'-OMe-nucleotide
  modified_base (18)..(18): 2'-fluoro-nucleotide
  modified_base (19)..(19): 2'-OMe-nucleotide
  modified_base (20)..(20): dT
  modified_base (21)..(21): dT
ugucuucguuugauugcugtt

SEQ ID NO: 1146 - DNA, 21 bp, Artificial Sequence
  source: /note="Description of Artificial Sequence: Synthetic oligonucleotide"
  source: /note="Description of Combined DNA/RNA Molecule: Synthetic oligonucleotide"
  modified_base (1)..(1): 2'-fluoro-nucleotide
  modified_base (2)..(2): 2'-fluoro-nucleotide
  modified_base (3)..(3): 2'-OMe-nucleotide
  modified_base (4)..(4): 2'-fluoro-nucleotide
  modified_base (5)..(5): 2'-OMe-nucleotide
  modified_base (6)..(6): 2'-fluoro-nucleotide
  modified_base (7)..(7): 2'-OMe-nucleotide
  modified_base (8)..(8): 2'-fluoro-nucleotide
  modified_base (9)..(9): 2'-OMe-nucleotide
  modified_base (10)..(10): 2'-fluoro-nucleotide
  modified_base (11)..(11): 2'-OMe-nucleotide
  modified_base (12)..(12): 2'-fluoro-nucleotide
  modified_base (13)..(13): 2'-OMe-nucleotide
  modified_base (14)..(14): 2'-fluoro-nucleotide
  modified_base (15)..(15): 2'-OMe-nucleotide
  modified_base (16)..(16): 2'-fluoro-nucleotide
  modified_base (17)..(17): 2'-OMe-nucleotide
  modified_base (18)..(18): 2'-fluoro-nucleotide
  modified_base (19)..(19): 2'-OMe-nucleotide
  modified_base (20)..(20): dT
  modified_base (21)..(21): dT
gugucuucguuugauugcutt

SEQ ID NO: 1147 - DNA, 21 bp, Artificial Sequence
  source: /note="Description of Artificial Sequence: Synthetic oligonucleotide"
  source: /note="Description of Combined DNA/RNA Molecule: Synthetic oligonucleotide"
  modified_base (1)..(1): 2'-fluoro-nucleotide
  modified_base (2)..(2): 2'-fluoro-nucleotide
  modified_base (3)..(3): 2'-OMe-nucleotide
  modified_base (4)..(4): 2'-fluoro-nucleotide
  modified_base (5)..(5): 2'-OMe-nucleotide
  modified_base (6)..(6): 2'-fluoro-nucleotide
  modified_base (7)..(7): 2'-OMe-nucleotide
  modified_base (8)..(8): 2'-fluoro-nucleotide
  modified_base (9)..(9): 2'-OMe-nucleotide
  modified_base (10)..(10): 2'-fluoro-nucleotide
  modified_base (11)..(11): 2'-OMe-nucleotide
  modified_base (12)..(12): 2'-fluoro-nucleotide
  modified_base (13)..(13): 2'-OMe-nucleotide
  modified_base (14)..(14): 2'-fluoro-nucleotide
  modified_base (15)..(15): 2'-OMe-nucleotide
  modified_base (16)..(16): 2'-fluoro-nucleotide
  modified_base (17)..(17): 2'-OMe-nucleotide
  modified_base (18)..(18): 2'-fluoro-nucleotide
  modified_base (19)..(19): 2'-OMe-nucleotide
  modified_base (20)..(20): dT
  modified_base (21)..(21): dT
agugucuucguuugauugctt

SEQ ID NO: 1148 - DNA, 21 bp, Artificial Sequence
  source: /note="Description of Artificial Sequence: Synthetic oligonucleotide"
  source: /note="Description of Combined DNA/RNA Molecule: Synthetic oligonucleotide"
  modified_base (1)..(1): 2'-fluoro-nucleotide
  modified_base (2)..(2): 2'-fluoro-nucleotide
  modified_base (3)..(3): 2'-OMe-nucleotide
  modified_base (4)..(4): 2'-fluoro-nucleotide
  modified_base (5)..(5): 2'-OMe-nucleotide
  modified_base (6)..(6): 2'-fluoro-nucleotide
  modified_base (7)..(7): 2'-OMe-nucleotide
  modified_base (8)..(8): 2'-fluoro-nucleotide
  modified_base (9)..(9): 2'-OMe-nucleotide
  modified_base (10)..(10): 2'-fluoro-nucleotide
  modified_base (11)..(11): 2'-OMe-nucleotide
  modified_base (12)..(12): 2'-fluoro-nucleotide
  modified_base (13)..(13): 2'-OMe-nucleotide
  modified_base (14)..(14): 2'-fluoro-nucleotide
  modified_base (15)..(15): 2'-OMe-nucleotide
  modified_base (16)..(16): 2'-fluoro-nucleotide
  modified_base (17)..(17): 2'-OMe-nucleotide
  modified_base (18)..(18): 2'-fluoro-nucleotide
  modified_base (19)..(19): 2'-OMe-nucleotide
  modified_base (20)..(20): dT
  modified_base (21)..(21): dT
cagugucuucguuugauugtt

SEQ ID NO: 1149 - DNA, 21 bp, Artificial Sequence
  source: /note="Description of Artificial Sequence: Synthetic oligonucleotide"
  source: /note="Description of Combined DNA/RNA Molecule: Synthetic oligonucleotide"
  modified_base (1)..(1): 2'-fluoro-nucleotide
  modified_base (2)..(2): 2'-fluoro-nucleotide
  modified_base (3)..(3): 2'-OMe-nucleotide
  modified_base (4)..(4): 2'-fluoro-nucleotide
  modified_base (5)..(5): 2'-OMe-nucleotide
  modified_base (6)..(6): 2'-fluoro-nucleotide
  modified_base (7)..(7): 2'-OMe-nucleotide
  modified_base (8)..(8): 2'-fluoro-nucleotide
  modified_base (9)..(9): 2'-OMe-nucleotide
  modified_base (10)..(10): 2'-fluoro-nucleotide
  modified_base (11)..(11): 2'-OMe-nucleotide
  modified_base (12)..(12): 2'-fluoro-nucleotide
  modified_base (13)..(13): 2'-OMe-nucleotide
  modified_base (14)..(14): 2'-fluoro-nucleotide
  modified_base (15)..(15): 2'-OMe-nucleotide
  modified_base (16)..(16): 2'-fluoro-nucleotide
  modified_base (17)..(17): 2'-OMe-nucleotide
  modified_base (18)..(18): 2'-fluoro-nucleotide
  modified_base (19)..(19): 2'-OMe-nucleotide
  modified_base (20)..(20): dT
  modified_base (21)..(21): dT
aacagugucuucguuugautt

SEQ ID NO: 1150 - DNA, 21 bp, Artificial Sequence
  source: /note="Description of Artificial Sequence: Synthetic oligonucleotide"
  source: /note="Description of Combined DNA/RNA Molecule: Synthetic oligonucleotide"
  modified_base (1)..(1): 2'-fluoro-nucleotide
  modified_base (2)..(2): 2'-fluoro-nucleotide
  modified_base (3)..(3): 2'-OMe-nucleotide
  modified_base (4)..(4): 2'-fluoro-nucleotide
  modified_base (5)..(5): 2'-OMe-nucleotide
  modified_base (6)..(6): 2'-fluoro-nucleotide
  modified_base (7)..(7): 2'-OMe-nucleotide
  modified_base (8)..(8): 2'-fluoro-nucleotide
  modified_base (9)..(9): 2'-OMe-nucleotide
  modified_base (10)..(10): 2'-fluoro-nucleotide
  modified_base (11)..(11): 2'-OMe-nucleotide
  modified_base (12)..(12): 2'-fluoro-nucleotide
  modified_base (13)..(13): 2'-OMe-nucleotide
  modified_base (14)..(14): 2'-fluoro-nucleotide
  modified_base (15)..(15): 2'-OMe-nucleotide
  modified_base (16)..(16): 2'-fluoro-nucleotide
  modified_base (17)..(17): 2'-OMe-nucleotide
  modified_base (18)..(18): 2'-fluoro-nucleotide
  modified_base (19)..(19): 2'-OMe-nucleotide
  modified_base (20)..(20): dT
  modified_base (21)..(21): dT
gaacagugucuucguuugatt

SEQ ID NO: 1151 - DNA, 21 bp, Artificial Sequence
  source: /note="Description of Artificial Sequence: Synthetic oligonucleotide"
  source: /note="Description of Combined DNA/RNA Molecule: Synthetic oligonucleotide"
  modified_base (1)..(1): 2'-fluoro-nucleotide
  modified_base (2)..(2): 2'-fluoro-nucleotide
  modified_base (3)..(3): 2'-OMe-nucleotide
  modified_base (4)..(4): 2'-fluoro-nucleotide
  modified_base (5)..(5): 2'-OMe-nucleotide
  modified_base (6)..(6): 2'-fluoro-nucleotide
  modified_base (7)..(7): 2'-OMe-nucleotide
  modified_base (8)..(8): 2'-fluoro-nucleotide
  modified_base (9)..(9): 2'-OMe-nucleotide
  modified_base (10)..(10): 2'-fluoro-nucleotide
  modified_base (11)..(11): 2'-OMe-nucleotide
  modified_base (12)..(12): 2'-fluoro-nucleotide
  modified_base (13)..(13): 2'-OMe-nucleotide
  modified_base (14)..(14): 2'-fluoro-nucleotide
  modified_base (15)..(15): 2'-OMe-nucleotide
  modified_base (16)..(16): 2'-fluoro-nucleotide
  modified_base (17)..(17): 2'-OMe-nucleotide
  modified_base (18)..(18): 2'-fluoro-nucleotide
  modified_base (19)..(19): 2'-OMe-nucleotide
  modified_base (20)..(20): dT
  modified_base (21)..(21): dT
ggaacagugucuucguuugtt

SEQ ID NO: 1152 - DNA, 21 bp, Artificial Sequence
  source: /note="Description of Artificial Sequence: Synthetic oligonucleotide"
  source: /note="Description of Combined DNA/RNA Molecule: Synthetic oligonucleotide"
  modified_base (1)..(1): 2'-fluoro-nucleotide
  modified_base (2)..(2): 2'-fluoro-nucleotide
  modified_base (3)..(3): 2'-OMe-nucleotide
  modified_base (4)..(4): 2'-fluoro-nucleotide
  modified_base (5)..(5): 2'-OMe-nucleotide
  modified_base (6)..(6): 2'-fluoro-nucleotide
  modified_base (7)..(7): 2'-OMe-nucleotide
  modified_base (8)..(8): 2'-fluoro-nucleotide
  modified_base (9)..(9): 2'-OMe-nucleotide
  modified_base (10)..(10): 2'-fluoro-nucleotide
  modified_base (11)..(11): 2'-OMe-nucleotide
  modified_base (12)..(12): 2'-fluoro-nucleotide
  modified_base (13)..(13): 2'-OMe-nucleotide
  modified_base (14)..(14): 2'-fluoro-nucleotide
  modified_base (15)..(15): 2'-OMe-nucleotide
  modified_base (16)..(16): 2'-fluoro-nucleotide
  modified_base (17)..(17): 2'-OMe-nucleotide
  modified_base (18)..(18): 2'-fluoro-nucleotide
  modified_base (19)..(19): 2'-OMe-nucleotide
  modified_base (20)..(20): dT
  modified_base (21)..(21): dT
gggaacagugucuucguuutt

SEQ ID NO: 1153 - DNA, 21 bp, Artificial Sequence
  source: /note="Description of Artificial Sequence: Synthetic oligonucleotide"
  source: /note="Description of Combined DNA/RNA Molecule: Synthetic oligonucleotide"
  modified_base (1)..(1): 2'-fluoro-nucleotide
  modified_base (2)..(2): 2'-fluoro-nucleotide
  modified_base (3)..(3): 2'-OMe-nucleotide
  modified_base (4)..(4): 2'-fluoro-nucleotide
  modified_base (5)..(5): 2'-OMe-nucleotide
  modified_base (6)..(6): 2'-fluoro-nucleotide
  modified_base (7)..(7): 2'-OMe-nucleotide
  modified_base (8)..(8): 2'-fluoro-nucleotide
  modified_base (9)..(9): 2'-OMe-nucleotide
  modified_base (10)..(10): 2'-fluoro-nucleotide
  modified_base (11)..(11): 2'-OMe-nucleotide
  modified_base (12)..(12): 2'-fluoro-nucleotide
  modified_base (13)..(13): 2'-OMe-nucleotide
  modified_base (14)..(14): 2'-fluoro-nucleotide
  modified_base (15)..(15): 2'-OMe-nucleotide
  modified_base (16)..(16): 2'-fluoro-nucleotide
  modified_base (17)..(17): 2'-OMe-nucleotide
  modified_base (18)..(18): 2'-fluoro-nucleotide
  modified_base (19)..(19): 2'-OMe-nucleotide
  modified_base (20)..(20): dT
  modified_base (21)..(21): dT
ugggaacagugucuucguutt

SEQ ID NO: 1154 - DNA, 21 bp, Artificial Sequence
  source: /note="Description of Artificial Sequence: Synthetic oligonucleotide"
  source: /note="Description of Combined DNA/RNA Molecule: Synthetic oligonucleotide"
  modified_base (1)..(1): 2'-fluoro-nucleotide
  modified_base (2)..(2): 2'-fluoro-nucleotide
  modified_base (3)..(3): 2'-OMe-nucleotide
  modified_base (4)..(4): 2'-fluoro-nucleotide
  modified_base (5)..(5): 2'-OMe-nucleotide
  modified_base (6)..(6): 2'-fluoro-nucleotide
  modified_base (7)..(7): 2'-OMe-nucleotide
  modified_base (8)..(8): 2'-fluoro-nucleotide
  modified_base (9)..(9): 2'-OMe-nucleotide
  modified_base (10)..(10): 2'-fluoro-nucleotide
  modified_base (11)..(11): 2'-OMe-nucleotide
  modified_base (12)..(12): 2'-fluoro-nucleotide
  modified_base (13)..(13): 2'-OMe-nucleotide
  modified_base (14)..(14): 2'-fluoro-nucleotide
  modified_base (15)..(15): 2'-OMe-nucleotide
  modified_base (16)..(16): 2'-fluoro-nucleotide
  modified_base (17)..(17): 2'-OMe-nucleotide
  modified_base (18)..(18): 2'-fluoro-nucleotide
  modified_base (19)..(19): 2'-OMe-nucleotide
  modified_base (20)..(20): dT
  modified_base (21)..(21): dT
cugggaacagugucuucgutt

SEQ ID NO: 1155 - DNA, 21 bp, Artificial Sequence
  source: /note="Description of Artificial Sequence: Synthetic oligonucleotide"
  source: /note="Description of Combined DNA/RNA Molecule: Synthetic oligonucleotide"
  modified_base (1)..(1): 2'-fluoro-nucleotide
  modified_base (2)..(2): 2'-fluoro-nucleotide
  modified_base (3)..(3): 2'-OMe-nucleotide
  modified_base (4)..(4): 2'-fluoro-nucleotide
  modified_base (5)..(5): 2'-OMe-nucleotide
  modified_base (6)..(6): 2'-fluoro-nucleotide
  modified_base (7)..(7): 2'-OMe-nucleotide
  modified_base (8)..(8): 2'-fluoro-nucleotide
  modified_base (9)..(9): 2'-OMe-nucleotide
  modified_base (10)..(10): 2'-fluoro-nucleotide
  modified_base (11)..(11): 2'-OMe-nucleotide
  modified_base (12)..(12): 2'-fluoro-nucleotide
  modified_base (13)..(13): 2'-OMe-nucleotide
  modified_base (14)..(14): 2'-fluoro-nucleotide
  modified_base (15)..(15): 2'-OMe-nucleotide
  modified_base (16)..(16): 2'-fluoro-nucleotide
  modified_base (17)..(17): 2'-OMe-nucleotide
  modified_base (18)..(18): 2'-fluoro-nucleotide
  modified_base (19)..(19): 2'-OMe-nucleotide
  modified_base (20)..(20): dT
  modified_base (21)..(21): dT
gcugggaacagugucuucgtt

SEQ ID NO: 1156 - DNA, 21 bp, Artificial Sequence
  source: /note="Description of Artificial Sequence: Synthetic oligonucleotide"
  source: /note="Description of Combined DNA/RNA Molecule: Synthetic oligonucleotide"
  modified_base (1)..(1): 2'-fluoro-nucleotide
  modified_base (2)..(2): 2'-fluoro-nucleotide
  modified_base (3)..(3): 2'-OMe-nucleotide
  modified_base (4)..(4): 2'-fluoro-nucleotide
  modified_base (5)..(5): 2'-OMe-nucleotide
  modified_base (6)..(6): 2'-fluoro-nucleotide
  modified_base (7)..(7): 2'-OMe-nucleotide
  modified_base (8)..(8): 2'-fluoro-nucleotide
  modified_base (9)..(9): 2'-OMe-nucleotide
  modified_base (10)..(10): 2'-fluoro-nucleotide
  modified_base (11)..(11): 2'-OMe-nucleotide
  modified_base (12)..(12): 2'-fluoro-nucleotide
  modified_base (13)..(13): 2'-OMe-nucleotide
  modified_base (14)..(14): 2'-fluoro-nucleotide
  modified_base (15)..(15): 2'-OMe-nucleotide
  modified_base (16)..(16): 2'-fluoro-nucleotide
  modified_base (17)..(17): 2'-OMe-nucleotide
  modified_base (18)..(18): 2'-fluoro-nucleotide
  modified_base (19)..(19): 2'-OMe-nucleotide
  modified_base (20)..(20): dT
  modified_base (21)..(21): dT
agcugggaacagugucuuctt

SEQ ID NO: 1157 - DNA, 21 bp, Artificial Sequence
  source: /note="Description of Artificial Sequence: Synthetic oligonucleotide"
  source: /note="Description of Combined DNA/RNA Molecule: Synthetic oligonucleotide"
  modified_base (1)..(1): 2'-fluoro-nucleotide
  modified_base (2)..(2): 2'-fluoro-nucleotide
  modified_base (3)..(3): 2'-OMe-nucleotide
  modified_base (4)..(4): 2'-fluoro-nucleotide
  modified_base (5)..(5): 2'-OMe-nucleotide
  modified_base (6)..(6): 2'-fluoro-nucleotide
  modified_base (7)..(7): 2'-OMe-nucleotide
  modified_base (8)..(8): 2'-fluoro-nucleotide
  modified_base (9)..(9): 2'-OMe-nucleotide
  modified_base (10)..(10): 2'-fluoro-nucleotide
  modified_base (11)..(11): 2'-OMe-nucleotide
  modified_base (12)..(12): 2'-fluoro-nucleotide
  modified_base (13)..(13): 2'-OMe-nucleotide
  modified_base (14)..(14): 2'-fluoro-nucleotide
  modified_base (15)..(15): 2'-OMe-nucleotide
  modified_base (16)..(16): 2'-fluoro-nucleotide
  modified_base (17)..(17): 2'-OMe-nucleotide
  modified_base (18)..(18): 2'-fluoro-nucleotide
  modified_base (19)..(19): 2'-OMe-nucleotide
  modified_base (20)..(20): dT
  modified_base (21)..(21): dT
uagcugggaacagugucuutt

SEQ ID NO: 1158 - DNA, 21 bp, Artificial Sequence
  source: /note="Description of Artificial Sequence: Synthetic oligonucleotide"
  source: /note="Description of Combined DNA/RNA Molecule: Synthetic oligonucleotide"
  modified_base (1)..(1): 2'-fluoro-nucleotide
  modified_base (2)..(2): 2'-fluoro-nucleotide
  modified_base (3)..(3): 2'-OMe-nucleotide
  modified_base (4)..(4): 2'-fluoro-nucleotide
  modified_base (5)..(5): 2'-OMe-nucleotide
  modified_base (6)..(6): 2'-fluoro-nucleotide
  modified_base (7)..(7): 2'-OMe-nucleotide
  modified_base (8)..(8): 2'-fluoro-nucleotide
  modified_base (9)..(9): 2'-OMe-nucleotide
  modified_base (10)..(10): 2'-fluoro-nucleotide
  modified_base (11)..(11): 2'-OMe-nucleotide
  modified_base (12)..(12): 2'-fluoro-nucleotide
  modified_base (13)..(13): 2'-OMe-nucleotide
  modified_base (14)..(14): 2'-fluoro-nucleotide
  modified_base (15)..(15): 2'-OMe-nucleotide
  modified_base (16)..(16): 2'-fluoro-nucleotide
  modified_base (17)..(17): 2'-OMe-nucleotide
  modified_base (18)..(18): 2'-fluoro-nucleotide
  modified_base (19)..(19): 2'-OMe-nucleotide
  modified_base (20)..(20): dT
  modified_base (21)..(21): dT
guagcugggaacagugucutt

SEQ ID NO: 1159 - DNA, 21 bp, Artificial Sequence
  source: /note="Description of Artificial Sequence: Synthetic oligonucleotide"
  source: /note="Description of Combined DNA/RNA Molecule: Synthetic oligonucleotide"
  modified_base (1)..(1): 2'-fluoro-nucleotide
  modified_base (2)..(2): 2'-fluoro-nucleotide
  modified_base (3)..(3): 2'-OMe-nucleotide
  modified_base (4)..(4): 2'-fluoro-nucleotide
  modified_base (5)..(5): 2'-OMe-nucleotide
  modified_base (6)..(6): 2'-fluoro-nucleotide
  modified_base (7)..(7): 2'-OMe-nucleotide
  modified_base (8)..(8): 2'-fluoro-nucleotide
  modified_base (9)..(9): 2'-OMe-nucleotide
  modified_base (10)..(10): 2'-fluoro-nucleotide
  modified_base (11)..(11): 2'-OMe-nucleotide
  modified_base (12)..(12): 2'-fluoro-nucleotide
  modified_base (13)..(13): 2'-OMe-nucleotide
  modified_base (14)..(14): 2'-fluoro-nucleotide
  modified_base (15)..(15): 2'-OMe-nucleotide
  modified_base (16)..(16): 2'-fluoro-nucleotide
  modified_base (17)..(17): 2'-OMe-nucleotide
  modified_base (18)..(18): 2'-fluoro-nucleotide
  modified_base (19)..(19): 2'-OMe-nucleotide
  modified_base (20)..(20): dT
  modified_base (21)..(21): dT
gguagcugggaacaguguctt

SEQ ID NO: 1160 - DNA, 21 bp, Artificial Sequence
  source: /note="Description of Artificial Sequence: Synthetic oligonucleotide"
  source: /note="Description of Combined DNA/RNA Molecule: Synthetic oligonucleotide"
  modified_base (1)..(1): 2'-fluoro-nucleotide
  modified_base (2)..(2): 2'-fluoro-nucleotide
  modified_base (3)..(3): 2'-OMe-nucleotide
  modified_base (4)..(4): 2'-fluoro-nucleotide
  modified_base (5)..(5): 2'-OMe-nucleotide
  modified_base (6)..(6): 2'-fluoro-nucleotide
  modified_base (7)..(7): 2'-OMe-nucleotide
  modified_base (8)..(8): 2'-fluoro-nucleotide
  modified_base (9)..(9): 2'-OMe-nucleotide
  modified_base (10)..(10): 2'-fluoro-nucleotide
  modified_base (11)..(11): 2'-OMe-nucleotide
  modified_base (12)..(12): 2'-fluoro-nucleotide
  modified_base (13)..(13): 2'-OMe-nucleotide
  modified_base (14)..(14): 2'-fluoro-nucleotide
  modified_base (15)..(15): 2'-OMe-nucleotide
  modified_base (16)..(16): 2'-fluoro-nucleotide
  modified_base (17)..(17): 2'-OMe-nucleotide
  modified_base (18)..(18): 2'-fluoro-nucleotide
  modified_base (19)..(19): 2'-OMe-nucleotide
  modified_base (20)..(20): dT
  modified_base (21)..(21): dT
ugguagcugggaacagugutt

SEQ ID NO: 1161 - DNA, 21 bp, Artificial Sequence
  source: /note="Description of Artificial Sequence: Synthetic oligonucleotide"
  source: /note="Description of Combined DNA/RNA Molecule: Synthetic oligonucleotide"
  modified_base (1)..(1): 2'-fluoro-nucleotide
  modified_base (2)..(2): 2'-fluoro-nucleotide
  modified_base (3)..(3): 2'-OMe-nucleotide
  modified_base (4)..(4): 2'-fluoro-nucleotide
  modified_base (5)..(5): 2'-OMe-nucleotide
  modified_base (6)..(6): 2'-fluoro-nucleotide
  modified_base (7)..(7): 2'-OMe-nucleotide
  modified_base (8)..(8): 2'-fluoro-nucleotide
  modified_base (9)..(9): 2'-OMe-nucleotide
  modified_base (10)..(10): 2'-fluoro-nucleotide
  modified_base (11)..(11): 2'-OMe-nucleotide
  modified_base (12)..(12): 2'-fluoro-nucleotide
  modified_base (13)..(13): 2'-OMe-nucleotide
  modified_base (14)..(14): 2'-fluoro-nucleotide
  modified_base (15)..(15): 2'-OMe-nucleotide
  modified_base (16)..(16): 2'-fluoro-nucleotide
  modified_base (17)..(17): 2'-OMe-nucleotide
  modified_base (18)..(18): 2'-fluoro-nucleotide
  modified_base (19)..(19): 2'-OMe-nucleotide
  modified_base (20)..(20): dT
  modified_base (21)..(21): dT
uggcauagcugguagcuggtt

SEQ ID NO: 1162 - DNA, 21 bp, Artificial Sequence
  source: /note="Description of Artificial Sequence: Synthetic oligonucleotide"
  source: /note="Description of Combined DNA/RNA Molecule: Synthetic oligonucleotide"
  modified_base (1)..(1): 2'-fluoro-nucleotide
  modified_base (2)..(2): 2'-fluoro-nucleotide
  modified_base (3)..(3): 2'-OMe-nucleotide
  modified_base (4)..(4): 2'-fluoro-nucleotide
  modified_base (5)..(5): 2'-OMe-nucleotide
  modified_base (6)..(6): 2'-fluoro-nucleotide
  modified_base (7)..(7): 2'-OMe-nucleotide
  modified_base (8)..(8): 2'-fluoro-nucleotide
  modified_base (9)..(9): 2'-OMe-nucleotide
  modified_base (10)..(10): 2'-fluoro-nucleotide
  modified_base (11)..(11): 2'-OMe-nucleotide
  modified_base (12)..(12): 2'-fluoro-nucleotide
  modified_base (13)..(13): 2'-OMe-nucleotide
  modified_base (14)..(14): 2'-fluoro-nucleotide
  modified_base (15)..(15): 2'-OMe-nucleotide
  modified_base (16)..(16): 2'-fluoro-nucleotide
  modified_base (17)..(17): 2'-OMe-nucleotide
  modified_base (18)..(18): 2'-fluoro-nucleotide
  modified_base (19)..(19): 2'-OMe-nucleotide
  modified_base (20)..(20): dT
  modified_base (21)..(21): dT
uuggcauagcugguagcugtt

SEQ ID NO: 1163 - DNA, 21 bp, Artificial Sequence
  source: /note="Description of Artificial Sequence: Synthetic oligonucleotide"
  source: /note="Description of Combined DNA/RNA Molecule: Synthetic oligonucleotide"
  modified_base (1)..(1): 2'-fluoro-nucleotide
  modified_base (2)..(2): 2'-fluoro-nucleotide
  modified_base (3)..(3): 2'-OMe-nucleotide
  modified_base (4)..(4): 2'-fluoro-nucleotide
  modified_base (5)..(5): 2'-OMe-nucleotide
  modified_base (6)..(6): 2'-fluoro-nucleotide
  modified_base (7)..(7): 2'-OMe-nucleotide
  modified_base (8)..(8): 2'-fluoro-nucleotide
  modified_base (9)..(9): 2'-OMe-nucleotide
  modified_base (10)..(10): 2'-fluoro-nucleotide
  modified_base (11)..(11): 2'-OMe-nucleotide
  modified_base (12)..(12): 2'-fluoro-nucleotide
  modified_base (13)..(13): 2'-OMe-nucleotide
  modified_base (14)..(14): 2'-fluoro-nucleotide
  modified_base (15)..(15): 2'-OMe-nucleotide
  modified_base (16)..(16): 2'-fluoro-nucleotide
  modified_base (17)..(17): 2'-OMe-nucleotide
  modified_base (18)..(18): 2'-fluoro-nucleotide
  modified_base (19)..(19): 2'-OMe-nucleotide
  modified_base (20)..(20): dT
  modified_base (21)..(21): dT
uuuggcauagcugguagcutt

SEQ ID NO: 1164 - DNA, 21 bp, Artificial Sequence
  source: /note="Description of Artificial Sequence: Synthetic oligonucleotide"
  source: /note="Description of Combined DNA/RNA Molecule: Synthetic oligonucleotide"
  modified_base (1)..(1): 2'-fluoro-nucleotide
  modified_base (2)..(2): 2'-fluoro-nucleotide
  modified_base (3)..(3): 2'-OMe-nucleotide
  modified_base (4)..(4): 2'-fluoro-nucleotide
  modified_base (5)..(5): 2'-OMe-nucleotide
  modified_base (6)..(6): 2'-fluoro-nucleotide
  modified_base (7)..(7): 2'-OMe-nucleotide
  modified_base (8)..(8): 2'-fluoro-nucleotide
  modified_base (9)..(9): 2'-OMe-nucleotide
  modified_base (10)..(10): 2'-fluoro-nucleotide
  modified_base (11)..(11): 2'-OMe-nucleotide
  modified_base (12)..(12): 2'-fluoro-nucleotide
  modified_base (13)..(13): 2'-OMe-nucleotide
  modified_base (14)..(14): 2'-fluoro-nucleotide
  modified_base (15)..(15): 2'-OMe-nucleotide
  modified_base (16)..(16): 2'-fluoro-nucleotide
  modified_base (17)..(17): 2'-OMe-nucleotide
  modified_base (18)..(18): 2'-fluoro-nucleotide
  modified_base (19)..(19): 2'-OMe-nucleotide
  modified_base (20)..(20): dT
  modified_base (21)..(21): dT
guuuggcauagcugguagctt

SEQ ID NO: 1165 - DNA, 21 bp, Artificial Sequence
  source: /note="Description of Artificial Sequence: Synthetic oligonucleotide"
  source: /note="Description of Combined DNA/RNA Molecule: Synthetic oligonucleotide"
  modified_base (1)..(1): 2'-fluoro-nucleotide
  modified_base (2)..(2): 2'-fluoro-nucleotide
  modified_base (3)..(3): 2'-OMe-nucleotide
  modified_base (4)..(4): 2'-fluoro-nucleotide
  modified_base (5)..(5): 2'-OMe-nucleotide
  modified_base (6)..(6): 2'-fluoro-nucleotide
  modified_base (7)..(7): 2'-OMe-nucleotide
  modified_base (8)..(8): 2'-fluoro-nucleotide
  modified_base (9)..(9): 2'-OMe-nucleotide
  modified_base (10)..(10): 2'-fluoro-nucleotide
  modified_base (11)..(11): 2'-OMe-nucleotide
  modified_base (12)..(12): 2'-fluoro-nucleotide
  modified_base (13)..(13): 2'-OMe-nucleotide
  modified_base (14)..(14): 2'-fluoro-nucleotide
  modified_base (15)..(15): 2'-OMe-nucleotide
  modified_base (16)..(16): 2'-fluoro-nucleotide
  modified_base (17)..(17): 2'-OMe-nucleotide
  modified_base (18)..(18): 2'-fluoro-nucleotide
  modified_base (19)..(19): 2'-OMe-nucleotide
  modified_base (20)..(20): dT
  modified_base (21)..(21): dT
gguuuggcauagcugguagtt

SEQ ID NO: 1166 - DNA, 21 bp, Artificial Sequence
  source: /note="Description of Artificial Sequence: Synthetic oligonucleotide"
  source: /note="Description of Combined DNA/RNA Molecule: Synthetic oligonucleotide"
  modified_base (1)..(1): 2'-fluoro-nucleotide
  modified_base (2)..(2): 2'-fluoro-nucleotide
  modified_base (3)..(3): 2'-OMe-nucleotide
  modified_base (4)..(4): 2'-fluoro-nucleotide
  modified_base (5)..(5): 2'-OMe-nucleotide
  modified_base (6)..(6): 2'-fluoro-nucleotide
  modified_base (7)..(7): 2'-OMe-nucleotide
  modified_base (8)..(8): 2'-fluoro-nucleotide
  modified_base (9)..(9): 2'-OMe-nucleotide
  modified_base (10)..(10): 2'-fluoro-nucleotide
  modified_base (11)..(11): 2'-OMe-nucleotide
  modified_base (12)..(12): 2'-fluoro-nucleotide
  modified_base (13)..(13): 2'-OMe-nucleotide
  modified_base (14)..(14): 2'-fluoro-nucleotide
  modified_base (15)..(15): 2'-OMe-nucleotide
  modified_base (16)..(16): 2'-fluoro-nucleotide
  modified_base (17)..(17): 2'-OMe-nucleotide
  modified_base (18)..(18): 2'-fluoro-nucleotide
  modified_base (19)..(19): 2'-OMe-nucleotide
  modified_base (20)..(20): dT
  modified_base (21)..(21): dT
agguuuggcauagcugguatt

SEQ ID NO: 1167 - DNA, 21 bp, Artificial Sequence
  source: /note="Description of Artificial Sequence: Synthetic oligonucleotide"
  source: /note="Description of Combined DNA/RNA Molecule: Synthetic oligonucleotide"
  modified_base (1)..(1): 2'-fluoro-nucleotide
  modified_base (2)..(2): 2'-fluoro-nucleotide
  modified_base (3)..(3): 2'-OMe-nucleotide
  modified_base (4)..(4): 2'-fluoro-nucleotide
  modified_base (5)..(5): 2'-OMe-nucleotide
  modified_base (6)..(6): 2'-fluoro-nucleotide
  modified_base (7)..(7): 2'-OMe-nucleotide
  modified_base (8)..(8): 2'-fluoro-nucleotide
  modified_base (9)..(9): 2'-OMe-nucleotide
  modified_base (10)..(10): 2'-fluoro-nucleotide
  modified_base (11)..(11): 2'-OMe-nucleotide
  modified_base (12)..(12): 2'-fluoro-nucleotide
  modified_base (13)..(13): 2'-OMe-nucleotide
  modified_base (14)..(14): 2'-fluoro-nucleotide
  modified_base (15)..(15): 2'-OMe-nucleotide
  modified_base (16)..(16): 2'-fluoro-nucleotide
  modified_base (17)..(17): 2'-OMe-nucleotide
  modified_base (18)..(18): 2'-fluoro-nucleotide
  modified_base (19)..(19): 2'-OMe-nucleotide
  modified_base (20)..(20): dT
  modified_base (21)..(21): dT
acaaaaauaccaaaaaugctt

SEQ ID NO: 1168 - DNA, 21 bp, Artificial Sequence
  source: /note="Description of Artificial Sequence: Synthetic oligonucleotide"
  source: /note="Description of Combined DNA/RNA Molecule: Synthetic oligonucleotide"
  modified_base (1)..(1): 2'-fluoro-nucleotide
  modified_base (2)..(2): 2'-fluoro-nucleotide
  modified_base (3)..(3): 2'-OMe-nucleotide
  modified_base (4)..(4): 2'-fluoro-nucleotide
  modified_base (5)..(5): 2'-OMe-nucleotide
  modified_base (6)..(6): 2'-fluoro-nucleotide
  modified_base (7)..(7): 2'-OMe-nucleotide
  modified_base (8)..(8): 2'-fluoro-nucleotide
  modified_base (9)..(9): 2'-OMe-nucleotide
  modified_base (10)..(10): 2'-fluoro-nucleotide
  modified_base (11)..(11): 2'-OMe-nucleotide
  modified_base (12)..(12): 2'-fluoro-nucleotide
  modified_base (13)..(13): 2'-OMe-nucleotide
  modified_base (14)..(14): 2'-fluoro-nucleotide
  modified_base (15)..(15): 2'-OMe-nucleotide
  modified_base (16)..(16): 2'-fluoro-nucleotide
  modified_base (17)..(17): 2'-OMe-nucleotide
  modified_base (18)..(18): 2'-fluoro-nucleotide
  modified_base (19)..(19): 2'-OMe-nucleotide
  modified_base (20)..(20): dT
  modified_base (21)..(21): dT
cacaaaaauaccaaaaaugtt

SEQ ID NO: 1169 - DNA, 21 bp, Artificial Sequence
  source: /note="Description of Artificial Sequence: Synthetic oligonucleotide"
  source: /note="Description of Combined DNA/RNA Molecule: Synthetic oligonucleotide"
  modified_base (1)..(1): 2'-fluoro-nucleotide
  modified_base (2)..(2): 2'-fluoro-nucleotide
  modified_base (3)..(3): 2'-OMe-nucleotide
  modified_base (4)..(4): 2'-fluoro-nucleotide
  modified_base (5)..(5): 2'-OMe-nucleotide
  modified_base (6)..(6): 2'-fluoro-nucleotide
  modified_base (7)..(7): 2'-OMe-nucleotide
  modified_base (8)..(8): 2'-fluoro-nucleotide
  modified_base (9)..(9): 2'-OMe-nucleotide
  modified_base (10)..(10): 2'-fluoro-nucleotide
  modified_base (11)..(11): 2'-OMe-nucleotide
  modified_base (12)..(12): 2'-fluoro-nucleotide
  modified_base (13)..(13): 2'-OMe-nucleotide
  modified_base (14)..(14): 2'-fluoro-nucleotide
  modified_base (15)..(15): 2'-OMe-nucleotide
  modified_base (16)..(16): 2'-fluoro-nucleotide
  modified_base (17)..(17): 2'-OMe-nucleotide
  modified_base (18)..(18): 2'-fluoro-nucleotide
  modified_base (19)..(19): 2'-OMe-nucleotide
  modified_base (20)..(20): dT
  modified_base (21)..(21): dT
acacaaaaauaccaaaaautt

SEQ ID NO: 1170 - DNA, 21 bp, Artificial Sequence
  source: /note="Description of Artificial Sequence: Synthetic oligonucleotide"
  source: /note="Description of Combined DNA/RNA Molecule: Synthetic oligonucleotide"
  modified_base (1)..(1): 2'-fluoro-nucleotide
  modified_base (2)..(2): 2'-fluoro-nucleotide
  modified_base (3)..(3): 2'-OMe-nucleotide
  modified_base (4)..(4): 2'-fluoro-nucleotide
  modified_base (5)..(5): 2'-OMe-nucleotide
  modified_base (6)..(6): 2'-fluoro-nucleotide
  modified_base (7)..(7): 2'-OMe-nucleotide
  modified_base (8)..(8): 2'-fluoro-nucleotide
  modified_base (9)..(9): 2'-OMe-nucleotide
  modified_base (10)..(10): 2'-fluoro-nucleotide
  modified_base (11)..(11): 2'-OMe-nucleotide
  modified_base (12)..(12): 2'-fluoro-nucleotide
  modified_base (13)..(13): 2'-OMe-nucleotide
  modified_base (14)..(14): 2'-fluoro-nucleotide
  modified_base (15)..(15): 2'-OMe-nucleotide
  modified_base (16)..(16): 2'-fluoro-nucleotide
  modified_base (17)..(17): 2'-OMe-nucleotide
  modified_base (18)..(18): 2'-fluoro-nucleotide
  modified_base (19)..(19): 2'-OMe-nucleotide
  modified_base (20)..(20): dT
  modified_base (21)..(21): dT
uacacaaaaauaccaaaaatt

SEQ ID NO: 1171 - DNA, 21 bp, Artificial Sequence
  source: /note="Description of Artificial Sequence: Synthetic oligonucleotide"
  source: /note="Description of Combined DNA/RNA Molecule: Synthetic oligonucleotide"
  modified_base (1)..(1): 2'-fluoro-nucleotide
  modified_base (2)..(2): 2'-fluoro-nucleotide
  modified_base (3)..(3): 2'-OMe-nucleotide
  modified_base (4)..(4): 2'-fluoro-nucleotide
  modified_base (5)..(5): 2'-OMe-nucleotide
  modified_base (6)..(6): 2'-fluoro-nucleotide
  modified_base (7)..(7): 2'-OMe-nucleotide
  modified_base (8)..(8): 2'-fluoro-nucleotide
  modified_base (9)..(9): 2'-OMe-nucleotide
  modified_base (10)..(10): 2'-fluoro-nucleotide
  modified_base (11)..(11): 2'-OMe-nucleotide
  modified_base (12)..(12): 2'-fluoro-nucleotide
  modified_base (13)..(13): 2'-OMe-nucleotide
  modified_base (14)..(14): 2'-fluoro-nucleotide
  modified_base (15)..(15): 2'-OMe-nucleotide
  modified_base (16)..(16): 2'-fluoro-nucleotide
  modified_base (17)..(17): 2'-OMe-nucleotide
  modified_base (18)..(18): 2'-fluoro-nucleotide
  modified_base (19)..(19): 2'-OMe-nucleotide
  modified_base (20)..(20): dT
  modified_base (21)..(21): dT
auacacaaaaauaccaaaatt

SEQ ID NO: 1172 - DNA, 21 bp, Artificial Sequence
  source: /note="Description of Artificial Sequence: Synthetic oligonucleotide"
  source: /note="Description of Combined DNA/RNA Molecule: Synthetic oligonucleotide"
  modified_base (1)..(1): 2'-fluoro-nucleotide
  modified_base (2)..(2): 2'-fluoro-nucleotide
  modified_base (3)..(3): 2'-OMe-nucleotide
  modified_base (4)..(4): 2'-fluoro-nucleotide
  modified_base (5)..(5): 2'-OMe-nucleotide
  modified_base (6)..(6): 2'-fluoro-nucleotide
  modified_base (7)..(7): 2'-OMe-nucleotide
  modified_base (8)..(8): 2'-fluoro-nucleotide
  modified_base (9)..(9): 2'-OMe-nucleotide
  modified_base (10)..(10): 2'-fluoro-nucleotide
  modified_base (11)..(11): 2'-OMe-nucleotide
  modified_base (12)..(12): 2'-fluoro-nucleotide
  modified_base (13)..(13): 2'-OMe-nucleotide
  modified_base (14)..(14): 2'-fluoro-nucleotide
  modified_base (15)..(15): 2'-OMe-nucleotide
  modified_base (16)..(16): 2'-fluoro-nucleotide
  modified_base (17)..(17): 2'-OMe-nucleotide
  modified_base (18)..(18): 2'-fluoro-nucleotide
  modified_base (19)..(19): 2'-OMe-nucleotide
  modified_base (20)..(20): dT
  modified_base (21)..(21): dT
uauacacaaaaauaccaaatt

SEQ ID NO: 1173 - DNA, 21 bp, Artificial Sequence
  source: /note="Description of Artificial Sequence: Synthetic oligonucleotide"
  source: /note="Description of Combined DNA/RNA Molecule: Synthetic oligonucleotide"
  modified_base (1)..(1): 2'-fluoro-nucleotide
  modified_base (2)..(2): 2'-fluoro-nucleotide
  modified_base (3)..(3): 2'-OMe-nucleotide
  modified_base (4)..(4): 2'-fluoro-nucleotide
  modified_base (5)..(5): 2'-OMe-nucleotide
  modified_base (6)..(6): 2'-fluoro-nucleotide
  modified_base (7)..(7): 2'-OMe-nucleotide
  modified_base (8)..(8): 2'-fluoro-nucleotide
  modified_base (9)..(9): 2'-OMe-nucleotide
  modified_base (10)..(10): 2'-fluoro-nucleotide
  modified_base (11)..(11): 2'-OMe-nucleotide
  modified_base (12)..(12): 2'-fluoro-nucleotide
  modified_base (13)..(13): 2'-OMe-nucleotide
  modified_base (14)..(14): 2'-fluoro-nucleotide
  modified_base (15)..(15): 2'-OMe-nucleotide
  modified_base (16)..(16): 2'-fluoro-nucleotide
  modified_base (17)..(17): 2'-OMe-nucleotide
  modified_base (18)..(18): 2'-fluoro-nucleotide
  modified_base (19)..(19): 2'-OMe-nucleotide
  modified_base (20)..(20): dT
  modified_base (21)..(21): dT
uuauacacaaaaauaccaatt

SEQ ID NO: 1174 - DNA, 21 bp, Artificial Sequence
  source: /note="Description of Artificial Sequence: Synthetic oligonucleotide"
  source: /note="Description of Combined DNA/RNA Molecule: Synthetic oligonucleotide"
  modified_base (1)..(1): 2'-fluoro-nucleotide
  modified_base (2)..(2): 2'-fluoro-nucleotide
  modified_base (3)..(3): 2'-OMe-nucleotide
  modified_base (4)..(4): 2'-fluoro-nucleotide
  modified_base (5)..(5): 2'-OMe-nucleotide
  modified_base (6)..(6): 2'-fluoro-nucleotide
  modified_base (7)..(7): 2'-OMe-nucleotide
  modified_base (8)..(8): 2'-fluoro-nucleotide
  modified_base (9)..(9): 2'-OMe-nucleotide
  modified_base (10)..(10): 2'-fluoro-nucleotide
  modified_base (11)..(11): 2'-OMe-nucleotide
  modified_base (12)..(12): 2'-fluoro-nucleotide
  modified_base (13)..(13): 2'-OMe-nucleotide
  modified_base (14)..(14): 2'-fluoro-nucleotide
  modified_base (15)..(15): 2'-OMe-nucleotide
  modified_base (16)..(16): 2'-fluoro-nucleotide
  modified_base (17)..(17): 2'-OMe-nucleotide
  modified_base (18)..(18): 2'-fluoro-nucleotide
  modified_base (19)..(19): 2'-OMe-nucleotide
  modified_base (20)..(20): dT
  modified_base (21)..(21): dT
cuuauacacaaaaauaccatt

SEQ ID NO: 1175 - DNA, 21 bp, Artificial Sequence
  source: /note="Description of Artificial Sequence: Synthetic oligonucleotide"
  source: /note="Description of Combined DNA/RNA Molecule: Synthetic oligonucleotide"
  modified_base (1)..(1): 2'-fluoro-nucleotide
  modified_base (2)..(2): 2'-fluoro-nucleotide
  modified_base (3)..(3): 2'-OMe-nucleotide
  modified_base (4)..(4): 2'-fluoro-nucleotide
  modified_base (5)..(5): 2'-OMe-nucleotide
  modified_base (6)..(6): 2'-fluoro-nucleotide
  modified_base (7)..(7): 2'-OMe-nucleotide
  modified_base (8)..(8): 2'-fluoro-nucleotide
  modified_base (9)..(9): 2'-OMe-nucleotide
  modified_base (10)..(10): 2'-fluoro-nucleotide
  modified_base (11)..(11): 2'-OMe-nucleotide
  modified_base (12)..(12): 2'-fluoro-nucleotide
  modified_base (13)..(13): 2'-OMe-nucleotide
  modified_base (14)..(14): 2'-fluoro-nucleotide
  modified_base (15)..(15): 2'-OMe-nucleotide
  modified_base (16)..(16): 2'-fluoro-nucleotide
  modified_base (17)..(17): 2'-OMe-nucleotide
  modified_base (18)..(18): 2'-fluoro-nucleotide
  modified_base (19)..(19): 2'-OMe-nucleotide
  modified_base (20)..(20): dT
  modified_base (21)..(21): dT
gcuuauacacaaaaauacctt

SEQ ID NO: 1176 - DNA, 21 bp, Artificial Sequence
  source: /note="Description of Artificial Sequence: Synthetic oligonucleotide"
  source: /note="Description of Combined DNA/RNA Molecule: Synthetic oligonucleotide"
  modified_base (1)..(1): 2'-fluoro-nucleotide
  modified_base (2)..(2): 2'-fluoro-nucleotide
  modified_base (3)..(3): 2'-OMe-nucleotide
  modified_base (4)..(4): 2'-fluoro-nucleotide
  modified_base (5)..(5): 2'-OMe-nucleotide
  modified_base (6)..(6): 2'-fluoro-nucleotide
  modified_base (7)..(7): 2'-OMe-nucleotide
  modified_base (8)..(8): 2'-fluoro-nucleotide
  modified_base (9)..(9): 2'-OMe-nucleotide
  modified_base (10)..(10): 2'-fluoro-nucleotide
  modified_base (11)..(11): 2'-OMe-nucleotide
  modified_base (12)..(12): 2'-fluoro-nucleotide
  modified_base (13)..(13): 2'-OMe-nucleotide
  modified_base (14)..(14): 2'-fluoro-nucleotide
  modified_base (15)..(15): 2'-OMe-nucleotide
  modified_base (16)..(16): 2'-fluoro-nucleotide
  modified_base (17)..(17): 2'-OMe-nucleotide
  modified_base (18)..(18): 2'-fluoro-nucleotide
  modified_base (19)..(19): 2'-OMe-nucleotide
  modified_base (20)..(20): dT
  modified_base (21)..(21): dT
agcuuauacacaaaaauactt

SEQ ID NO: 1177 - DNA, 21 bp, Artificial Sequence
  source: /note="Description of Artificial Sequence: Synthetic oligonucleotide"
  source: /note="Description of Combined DNA/RNA Molecule: Synthetic oligonucleotide"
  modified_base (1)..(1): 2'-fluoro-nucleotide
  modified_base (2)..(2): 2'-fluoro-nucleotide
  modified_base (3)..(3): 2'-OMe-nucleotide
  modified_base (4)..(4): 2'-fluoro-nucleotide
  modified_base (5)..(5): 2'-OMe-nucleotide
  modified_base (6)..(6): 2'-fluoro-nucleotide
  modified_base (7)..(7): 2'-OMe-nucleotide
  modified_base (8)..(8): 2'-fluoro-nucleotide
  modified_base (9)..(9): 2'-OMe-nucleotide
  modified_base (10)..(10): 2'-fluoro-nucleotide
  modified_base (11)..(11): 2'-OMe-nucleotide
  modified_base (12)..(12): 2'-fluoro-nucleotide
  modified_base (13)..(13): 2'-OMe-nucleotide
  modified_base (14)..(14): 2'-fluoro-nucleotide
  modified_base (15)..(15): 2'-OMe-nucleotide
  modified_base (16)..(16): 2'-fluoro-nucleotide
  modified_base (17)..(17): 2'-OMe-nucleotide
  modified_base (18)..(18): 2'-fluoro-nucleotide
  modified_base (19)..(19): 2'-OMe-nucleotide
  modified_base (20)..(20): dT
  modified_base (21)..(21): dT
aagcuuauacacaaaaauatt

SEQ ID NO: 1178 - DNA, 21 bp, Artificial Sequence
  source: /note="Description of Artificial Sequence: Synthetic oligonucleotide"
  source: /note="Description of Combined DNA/RNA Molecule: Synthetic oligonucleotide"
  modified_base (1)..(1): 2'-fluoro-nucleotide
  modified_base (2)..(2): 2'-fluoro-nucleotide
  modified_base (3)..(3): 2'-OMe-nucleotide
  modified_base (4)..(4): 2'-fluoro-nucleotide
  modified_base (5)..(5): 2'-OMe-nucleotide
  modified_base (6)..(6): 2'-fluoro-nucleotide
  modified_base (7)..(7): 2'-OMe-nucleotide
  modified_base (8)..(8): 2'-fluoro-nucleotide
  modified_base (9)..(9): 2'-OMe-nucleotide
  modified_base (10)..(10): 2'-fluoro-nucleotide
  modified_base (11)..(11): 2'-OMe-nucleotide
  modified_base (12)..(12): 2'-fluoro-nucleotide
  modified_base (13)..(13): 2'-OMe-nucleotide
  modified_base (14)..(14): 2'-fluoro-nucleotide
  modified_base (15)..(15): 2'-OMe-nucleotide
  modified_base (16)..(16): 2'-fluoro-nucleotide
  modified_base (17)..(17): 2'-OMe-nucleotide
  modified_base (18)..(18): 2'-fluoro-nucleotide
  modified_base (19)..(19): 2'-OMe-nucleotide
  modified_base (20)..(20): dT
  modified_base (21)..(21): dT
aaagcuuauacacaaaaautt

SEQ ID NO: 1179 - DNA, 21 bp, Artificial Sequence
  source: /note="Description of Artificial Sequence: Synthetic oligonucleotide"
  source: /note="Description of Combined DNA/RNA Molecule: Synthetic oligonucleotide"
  modified_base (1)..(1): 2'-fluoro-nucleotide
  modified_base (2)..(2): 2'-fluoro-nucleotide
  modified_base (3)..(3): 2'-OMe-nucleotide
  modified_base (4)..(4): 2'-fluoro-nucleotide
  modified_base (5)..(5): 2'-OMe-nucleotide
  modified_base (6)..(6): 2'-fluoro-nucleotide
  modified_base (7)..(7): 2'-OMe-nucleotide
  modified_base (8)..(8): 2'-fluoro-nucleotide
  modified_base (9)..(9): 2'-OMe-nucleotide
  modified_base (10)..(10): 2'-fluoro-nucleotide
  modified_base (11)..(11): 2'-OMe-nucleotide
  modified_base (12)..(12): 2'-fluoro-nucleotide
  modified_base (13)..(13): 2'-OMe-nucleotide
  modified_base (14)..(14): 2'-fluoro-nucleotide
  modified_base (15)..(15): 2'-OMe-nucleotide
  modified_base (16)..(16): 2'-fluoro-nucleotide
  modified_base (17)..(17): 2'-OMe-nucleotide
  modified_base (18)..(18): 2'-fluoro-nucleotide
  modified_base (19)..(19): 2'-OMe-nucleotide
  modified_base (20)..(20): dT
  modified_base (21)..(21): dT
aaaagcuuauacacaaaaatt

SEQ ID NO: 1180 - DNA, 21 bp, Artificial Sequence
  source: /note="Description of Artificial Sequence: Synthetic oligonucleotide"
  source: /note="Description of Combined DNA/RNA Molecule: Synthetic oligonucleotide"
  modified_base (1)..(1): 2'-fluoro-nucleotide
  modified_base (2)..(2): 2'-fluoro-nucleotide
  modified_base (3)..(3): 2'-OMe-nucleotide
  modified_base (4)..(4): 2'-fluoro-nucleotide
  modified_base (5)..(5): 2'-OMe-nucleotide
  modified_base (6)..(6): 2'-fluoro-nucleotide
  modified_base (7)..(7): 2'-OMe-nucleotide
  modified_base (8)..(8): 2'-fluoro-nucleotide
  modified_base (9)..(9): 2'-OMe-nucleotide
  modified_base (10)..(10): 2'-fluoro-nucleotide
  modified_base (11)..(11): 2'-OMe-nucleotide
  modified_base (12)..(12): 2'-fluoro-nucleotide
  modified_base (13)..(13): 2'-OMe-nucleotide
  modified_base (14)..(14): 2'-fluoro-nucleotide
  modified_base (15)..(15): 2'-OMe-nucleotide
  modified_base (16)..(16): 2'-fluoro-nucleotide
  modified_base (17)..(17): 2'-OMe-nucleotide
  modified_base (18)..(18): 2'-fluoro-nucleotide
  modified_base (19)..(19): 2'-OMe-nucleotide
  modified_base (20)..(20): dT
  modified_base (21)..(21): dT
gcagaguuuauuuuuaacatt

SEQ ID NO: 1181 - DNA, 21 bp, Artificial Sequence
  source: /note="Description of Artificial Sequence: Synthetic oligonucleotide"
  source: /note="Description of Combined DNA/RNA Molecule: Synthetic oligonucleotide"
  modified_base (1)..(1): 2'-fluoro-nucleotide
  modified_base (2)..(2): 2'-fluoro-nucleotide
  modified_base (3)..(3): 2'-OMe-nucleotide
  modified_base (4)..(4): 2'-fluoro-nucleotide
  modified_base (5)..(5): 2'-OMe-nucleotide
  modified_base (6)..(6): 2'-fluoro-nucleotide
  modified_base (7)..(7): 2'-OMe-nucleotide
  modified_base (8)..(8): 2'-fluoro-nucleotide
  modified_base (9)..(9): 2'-OMe-nucleotide
  modified_base (10)..(10): 2'-fluoro-nucleotide
  modified_base (11)..(11): 2'-OMe-nucleotide
  modified_base (12)..(12): 2'-fluoro-nucleotide
  modified_base (13)..(13): 2'-OMe-nucleotide
  modified_base (14)..(14): 2'-fluoro-nucleotide
  modified_base (15)..(15): 2'-OMe-nucleotide
  modified_base (16)..(16): 2'-fluoro-nucleotide
  modified_base (17)..(17): 2'-OMe-nucleotide
  modified_base (18)..(18): 2'-fluoro-nucleotide
  modified_base (19)..(19): 2'-OMe-nucleotide
  modified_base (20)..(20): dT
  modified_base (21)..(21): dT
ugcagaguuuauuuuuaactt

SEQ ID NO: 1182 - DNA, 21 bp, Artificial Sequence
  source: /note="Description of Artificial Sequence: Synthetic oligonucleotide"
  source: /note="Description of Combined DNA/RNA Molecule: Synthetic oligonucleotide"
  modified_base (1)..(1): 2'-fluoro-nucleotide
  modified_base (2)..(2): 2'-fluoro-nucleotide
  modified_base (3)..(3): 2'-OMe-nucleotide
  modified_base (4)..(4): 2'-fluoro-nucleotide
  modified_base (5)..(5): 2'-OMe-nucleotide
  modified_base (6)..(6): 2'-fluoro-nucleotide
  modified_base (7)..(7): 2'-OMe-nucleotide
  modified_base (8)..(8): 2'-fluoro-nucleotide
  modified_base (9)..(9): 2'-OMe-nucleotide
  modified_base (10)..(10): 2'-fluoro-nucleotide
  modified_base (11)..(11): 2'-OMe-nucleotide
  modified_base (12)..(12): 2'-fluoro-nucleotide
  modified_base (13)..(13): 2'-OMe-nucleotide
  modified_base (14)..(14): 2'-fluoro-nucleotide
  modified_base (15)..(15): 2'-OMe-nucleotide
  modified_base (16)..(16): 2'-fluoro-nucleotide
  modified_base (17)..(17): 2'-OMe-nucleotide
  modified_base (18)..(18): 2'-fluoro-nucleotide
  modified_base (19)..(19): 2'-OMe-nucleotide
  modified_base (20)..(20): dT
  modified_base (21)..(21): dT
gugcagaguuuauuuuuaatt

SEQ ID NO: 1183 - DNA, 21 bp, Artificial Sequence
  source: /note="Description of Artificial Sequence: Synthetic oligonucleotide"
  source: /note="Description of Combined DNA/RNA Molecule: Synthetic oligonucleotide"
  modified_base (1)..(1): 2'-fluoro-nucleotide
  modified_base (2)..(2): 2'-fluoro-nucleotide
  modified_base (3)..(3): 2'-OMe-nucleotide
  modified_base (4)..(4): 2'-fluoro-nucleotide
  modified_base (5)..(5): 2'-OMe-nucleotide
  modified_base (6)..(6): 2'-fluoro-nucleotide
  modified_base (7)..(7): 2'-OMe-nucleotide
  modified_base (8)..(8): 2'-fluoro-nucleotide
  modified_base (9)..(9): 2'-OMe-nucleotide
  modified_base (10)..(10): 2'-fluoro-nucleotide
  modified_base (11)..(11): 2'-OMe-nucleotide
  modified_base (12)..(12): 2'-fluoro-nucleotide
  modified_base (13)..(13): 2'-OMe-nucleotide
  modified_base (14)..(14): 2'-fluoro-nucleotide
  modified_base (15)..(15): 2'-OMe-nucleotide
  modified_base (16)..(16): 2'-fluoro-nucleotide
  modified_base (17)..(17): 2'-OMe-nucleotide
  modified_base (18)..(18): 2'-fluoro-nucleotide
  modified_base (19)..(19): 2'-OMe-nucleotide
  modified_base (20)..(20): dT
  modified_base (21)..(21): dT
agugcagaguuuauuuuuatt

SEQ ID NO: 1184 - DNA, 21 bp, Artificial Sequence
  source: /note="Description of Artificial Sequence: Synthetic oligonucleotide"
  source: /note="Description of Combined DNA/RNA Molecule: Synthetic oligonucleotide"
  modified_base (1)..(1): 2'-fluoro-nucleotide
  modified_base (2)..(2): 2'-fluoro-nucleotide
  modified_base (3)..(3): 2'-OMe-nucleotide
  modified_base (4)..(4): 2'-fluoro-nucleotide
  modified_base (5)..(5): 2'-OMe-nucleotide
  modified_base (6)..(6): 2'-fluoro-nucleotide
  modified_base (7)..(7): 2'-OMe-nucleotide
  modified_base (8)..(8): 2'-fluoro-nucleotide
  modified_base (9)..(9): 2'-OMe-nucleotide
  modified_base (10)..(10): 2'-fluoro-nucleotide
  modified_base (11)..(11): 2'-OMe-nucleotide
  modified_base (12)..(12): 2'-fluoro-nucleotide
  modified_base (13)..(13): 2'-OMe-nucleotide
  modified_base (14)..(14): 2'-fluoro-nucleotide
  modified_base (15)..(15): 2'-OMe-nucleotide
  modified_base (16)..(16): 2'-fluoro-nucleotide
  modified_base (17)..(17): 2'-OMe-nucleotide
  modified_base (18)..(18): 2'-fluoro-nucleotide
  modified_base (19)..(19): 2'-OMe-nucleotide
  modified_base (20)..(20): dT
  modified_base (21)..(21): dT
aagugcagaguuuauuuuutt

SEQ ID NO: 1185 - DNA, 21 bp, Artificial Sequence
  source: /note="Description of Artificial Sequence: Synthetic oligonucleotide"
  source: /note="Description of Combined DNA/RNA Molecule: Synthetic oligonucleotide"
  modified_base (1)..(1): 2'-fluoro-nucleotide
  modified_base (2)..(2): 2'-fluoro-nucleotide
  modified_base (3)..(3): 2'-OMe-nucleotide
  modified_base (4)..(4): 2'-fluoro-nucleotide
  modified_base (5)..(5): 2'-OMe-nucleotide
  modified_base (6)..(6): 2'-fluoro-nucleotide
  modified_base (7)..(7): 2'-OMe-nucleotide
  modified_base (8)..(8): 2'-fluoro-nucleotide
  modified_base (9)..(9): 2'-OMe-nucleotide
  modified_base (10)..(10): 2'-fluoro-nucleotide
  modified_base (11)..(11): 2'-OMe-nucleotide
  modified_base (12)..(12): 2'-fluoro-nucleotide
  modified_base (13)..(13): 2'-OMe-nucleotide
  modified_base (14)..(14): 2'-fluoro-nucleotide
  modified_base (15)..(15): 2'-OMe-nucleotide
  modified_base (16)..(16): 2'-fluoro-nucleotide
  modified_base (17)..(17): 2'-OMe-nucleotide
  modified_base (18)..(18): 2'-fluoro-nucleotide
  modified_base (19)..(19): 2'-OMe-nucleotide
  modified_base (20)..(20): dT
  modified_base (21)..(21): dT
uaagugcagaguuuauuuutt

SEQ ID NO: 1186 - DNA, 21 bp, Artificial Sequence
  source: /note="Description of Artificial Sequence: Synthetic oligonucleotide"
  source: /note="Description of Combined DNA/RNA Molecule: Synthetic oligonucleotide"
  modified_base (1)..(1): 2'-fluoro-nucleotide
  modified_base (2)..(2): 2'-fluoro-nucleotide
  modified_base (3)..(3): 2'-OMe-nucleotide
  modified_base (4)..(4): 2'-fluoro-nucleotide
  modified_base (5)..(5): 2'-OMe-nucleotide
  modified_base (6)..(6): 2'-fluoro-nucleotide
  modified_base (7)..(7): 2'-OMe-nucleotide
  modified_base (8)..(8): 2'-fluoro-nucleotide
  modified_base (9)..(9): 2'-OMe-nucleotide
  modified_base (10)..(10): 2'-fluoro-nucleotide
  modified_base (11)..(11): 2'-OMe-nucleotide
  modified_base (12)..(12): 2'-fluoro-nucleotide
  modified_base (13)..(13): 2'-OMe-nucleotide
  modified_base (14)..(14): 2'-fluoro-nucleotide
  modified_base (15)..(15): 2'-OMe-nucleotide
  modified_base (16)..(16): 2'-fluoro-nucleotide
  modified_base (17)..(17): 2'-OMe-nucleotide
  modified_base (18)..(18): 2'-fluoro-nucleotide
  modified_base (19)..(19): 2'-OMe-nucleotide
  modified_base (20)..(20): dT
  modified_base (21)..(21): dT
auaagugcagaguuuauuutt

SEQ ID NO: 1187 - DNA, 21 bp, Artificial Sequence
  source: /note="Description of Artificial Sequence: Synthetic oligonucleotide"
  source: /note="Description of Combined DNA/RNA Molecule: Synthetic oligonucleotide"
  modified_base (1)..(1): 2'-fluoro-nucleotide
  modified_base (2)..(2): 2'-fluoro-nucleotide
  modified_base (3)..(3): 2'-OMe-nucleotide
  modified_base (4)..(4): 2'-fluoro-nucleotide
  modified_base (5)..(5): 2'-OMe-nucleotide
  modified_base (6)..(6): 2'-fluoro-nucleotide
  modified_base (7)..(7): 2'-OMe-nucleotide
  modified_base (8)..(8): 2'-fluoro-nucleotide
  modified_base (9)..(9): 2'-OMe-nucleotide
  modified_base (10)..(10): 2'-fluoro-nucleotide
  modified_base (11)..(11): 2'-OMe-nucleotide
  modified_base (12)..(12): 2'-fluoro-nucleotide
  modified_base (13)..(13): 2'-OMe-nucleotide
  modified_base (14)..(14): 2'-fluoro-nucleotide
  modified_base (15)..(15): 2'-OMe-nucleotide
  modified_base (16)..(16): 2'-fluoro-nucleotide
  modified_base (17)..(17): 2'-OMe-nucleotide
  modified_base (18)..(18): 2'-fluoro-nucleotide
  modified_base (19)..(19): 2'-OMe-nucleotide
  modified_base (20)..(20): dT
  modified_base (21)..(21): dT
aauaagugcagaguuuauutt

SEQ ID NO: 1188 - DNA, 21 bp, Artificial Sequence
  source: /note="Description of Artificial Sequence: Synthetic oligonucleotide"
  source: /note="Description of Combined DNA/RNA Molecule: Synthetic oligonucleotide"
  modified_base (1)..(1): 2'-fluoro-nucleotide
  modified_base (2)..(2): 2'-fluoro-nucleotide
  modified_base (3)..(3): 2'-OMe-nucleotide
  modified_base (4)..(4): 2'-fluoro-nucleotide
  modified_base (5)..(5): 2'-OMe-nucleotide
  modified_base (6)..(6): 2'-fluoro-nucleotide
  modified_base (7)..(7): 2'-OMe-nucleotide
  modified_base (8)..(8): 2'-fluoro-nucleotide
  modified_base (9)..(9): 2'-OMe-nucleotide
  modified_base (10)..(10): 2'-fluoro-nucleotide
  modified_base (11)..(11): 2'-OMe-nucleotide
  modified_base (12)..(12): 2'-fluoro-nucleotide
  modified_base (13)..(13): 2'-OMe-nucleotide
  modified_base (14)..(14): 2'-fluoro-nucleotide
  modified_base (15)..(15): 2'-OMe-nucleotide
  modified_base (16)..(16): 2'-fluoro-nucleotide
  modified_base (17)..(17): 2'-OMe-nucleotide
  modified_base (18)..(18): 2'-fluoro-nucleotide
  modified_base (19)..(19): 2'-OMe-nucleotide
  modified_base (20)..(20): dT
  modified_base (21)..(21): dT
aaauaagugcagaguuuautt

SEQ ID NO: 1189 - DNA, 21 bp, Artificial Sequence
  source: /note="Description of Artificial Sequence: Synthetic oligonucleotide"
  source: /note="Description of Combined DNA/RNA Molecule: Synthetic oligonucleotide"
  modified_base (1)..(1): 2'-fluoro-nucleotide
  modified_base (2)..(2): 2'-fluoro-nucleotide
  modified_base (3)..(3): 2'-OMe-nucleotide
  modified_base (4)..(4): 2'-fluoro-nucleotide
  modified_base (5)..(5): 2'-OMe-nucleotide
  modified_base (6)..(6): 2'-fluoro-nucleotide
  modified_base (7)..(7): 2'-OMe-nucleotide
  modified_base (8)..(8): 2'-fluoro-nucleotide
  modified_base (9)..(9): 2'-OMe-nucleotide
  modified_base (10)..(10): 2'-fluoro-nucleotide
  modified_base (11)..(11): 2'-OMe-nucleotide
  modified_base (12)..(12): 2'-fluoro-nucleotide
  modified_base (13)..(13): 2'-OMe-nucleotide
  modified_base (14)..(14): 2'-fluoro-nucleotide
  modified_base (15)..(15): 2'-OMe-nucleotide
  modified_base (16)..(16): 2'-fluoro-nucleotide
  modified_base (17)..(17): 2'-OMe-nucleotide
  modified_base (18)..(18): 2'-fluoro-nucleotide
  modified_base (19)..(19): 2'-OMe-nucleotide
  modified_base (20)..(20): dT
  modified_base (21)..(21): dT
aaaauaagugcagaguuuatt

SEQ ID NO: 1190 - DNA, 21 bp, Artificial Sequence
  source: /note="Description of Artificial Sequence: Synthetic oligonucleotide"
  source: /note="Description of Combined DNA/RNA Molecule: Synthetic oligonucleotide"
  modified_base (1)..(1): 2'-fluoro-nucleotide
  modified_base (2)..(2): 2'-fluoro-nucleotide
  modified_base (3)..(3): 2'-OMe-nucleotide
  modified_base (4)..(4): 2'-fluoro-nucleotide
  modified_base (5)..(5): 2'-OMe-nucleotide
  modified_base (6)..(6): 2'-fluoro-nucleotide
  modified_base (7)..(7): 2'-OMe-nucleotide
  modified_base (8)..(8): 2'-fluoro-nucleotide
  modified_base (9)..(9): 2'-OMe-nucleotide
  modified_base (10)..(10): 2'-fluoro-nucleotide
  modified_base (11)..(11): 2'-OMe-nucleotide
  modified_base (12)..(12): 2'-fluoro-nucleotide
  modified_base (13)..(13): 2'-OMe-nucleotide
  modified_base (14)..(14): 2'-fluoro-nucleotide
  modified_base (15)..(15): 2'-OMe-nucleotide
  modified_base (16)..(16): 2'-fluoro-nucleotide
  modified_base (17)..(17): 2'-OMe-nucleotide
  modified_base (18)..(18): 2'-fluoro-nucleotide
  modified_base (19)..(19): 2'-OMe-nucleotide
  modified_base (20)..(20): dT
  modified_base (21)..(21): dT
caaaauaagugcagaguuutt

SEQ ID NO: 1191 - DNA, 21 bp, Artificial Sequence
  source: /note="Description of Artificial Sequence: Synthetic oligonucleotide"
  source: /note="Description of Combined DNA/RNA Molecule: Synthetic oligonucleotide"
  modified_base (1)..(1): 2'-fluoro-nucleotide
  modified_base (2)..(2): 2'-fluoro-nucleotide
  modified_base (3)..(3): 2'-OMe-nucleotide
  modified_base (4)..(4): 2'-fluoro-nucleotide
  modified_base (5)..(5): 2'-OMe-nucleotide
  modified_base (6)..(6): 2'-fluoro-nucleotide
  modified_base (7)..(7): 2'-OMe-nucleotide
  modified_base (8)..(8): 2'-fluoro-nucleotide
  modified_base (9)..(9): 2'-OMe-nucleotide
  modified_base (10)..(10): 2'-fluoro-nucleotide
  modified_base (11)..(11): 2'-OMe-nucleotide
  modified_base (12)..(12): 2'-fluoro-nucleotide
  modified_base (13)..(13): 2'-OMe-nucleotide
  modified_base (14)..(14): 2'-fluoro-nucleotide
  modified_base (15)..(15): 2'-OMe-nucleotide
  modified_base (16)..(16): 2'-fluoro-nucleotide
  modified_base (17)..(17): 2'-OMe-nucleotide
  modified_base (18)..(18): 2'-fluoro-nucleotide
  modified_base (19)..(19): 2'-OMe-nucleotide
  modified_base (20)..(20): dT
  modified_base (21)..(21): dT
ucaaaauaagugcagaguutt

SEQ ID NO: 1192 - DNA, 21 bp, Artificial Sequence
  source: /note="Description of Artificial Sequence: Synthetic oligonucleotide"
  source: /note="Description of Combined DNA/RNA Molecule: Synthetic oligonucleotide"
  modified_base (1)..(1): 2'-fluoro-nucleotide
  modified_base (2)..(2): 2'-fluoro-nucleotide
  modified_base (3)..(3): 2'-OMe-nucleotide
  modified_base (4)..(4): 2'-fluoro-nucleotide
  modified_base (5)..(5): 2'-OMe-nucleotide
  modified_base (6)..(6): 2'-fluoro-nucleotide
  modified_base (7)..(7): 2'-OMe-nucleotide
  modified_base (8)..(8): 2'-fluoro-nucleotide
  modified_base (9)..(9): 2'-OMe-nucleotide
  modified_base (10)..(10): 2'-fluoro-nucleotide
  modified_base (11)..(11): 2'-OMe-nucleotide
  modified_base (12)..(12): 2'-fluoro-nucleotide
  modified_base (13)..(13): 2'-OMe-nucleotide
  modified_base (14)..(14): 2'-fluoro-nucleotide
  modified_base (15)..(15): 2'-OMe-nucleotide
  modified_base (16)..(16): 2'-fluoro-nucleotide
  modified_base (17)..(17): 2'-OMe-nucleotide
  modified_base (18)..(18): 2'-fluoro-nucleotide
  modified_base (19)..(19): 2'-OMe-nucleotide
  modified_base (20)..(20): dT
  modified_base (21)..(21): dT
aucaaaauaagugcagagutt

SEQ ID NO: 1193 - DNA, 21 bp, Artificial Sequence
  source: /note="Description of Artificial Sequence: Synthetic oligonucleotide"
  source: /note="Description of Combined DNA/RNA Molecule: Synthetic oligonucleotide"
  modified_base (1)..(1): 2'-fluoro-nucleotide
  modified_base (2)..(2): 2'-fluoro-nucleotide
  modified_base (3)..(3): 2'-OMe-nucleotide
  modified_base (4)..(4): 2'-fluoro-nucleotide
  modified_base (5)..(5): 2'-OMe-nucleotide
  modified_base (6)..(6): 2'-fluoro-nucleotide
  modified_base (7)..(7): 2'-OMe-nucleotide
  modified_base (8)..(8): 2'-fluoro-nucleotide
  modified_base (9)..(9): 2'-OMe-nucleotide
  modified_base (10)..(10): 2'-fluoro-nucleotide
  modified_base (11)..(11): 2'-OMe-nucleotide
  modified_base (12)..(12): 2'-fluoro-nucleotide
  modified_base (13)..(13): 2'-OMe-nucleotide
  modified_base (14)..(14): 2'-fluoro-nucleotide
  modified_base (15)..(15): 2'-OMe-nucleotide
  modified_base (16)..(16): 2'-fluoro-nucleotide
  modified_base (17)..(17): 2'-OMe-nucleotide
  modified_base (18)..(18): 2'-fluoro-nucleotide
  modified_base (19)..(19): 2'-OMe-nucleotide
  modified_base (20)..(20): dT
  modified_base (21)..(21): dT
aaucaaaauaagugcagagtt

SEQ ID NO: 1194 - DNA, 21 bp, Artificial Sequence
  source: /note="Description of Artificial Sequence: Synthetic oligonucleotide"
  source: /note="Description of Combined DNA/RNA Molecule: Synthetic oligonucleotide"
  modified_base (1)..(1): 2'-fluoro-nucleotide
  modified_base (2)..(2): 2'-fluoro-nucleotide
  modified_base (3)..(3): 2'-OMe-nucleotide
  modified_base (4)..(4): 2'-fluoro-nucleotide
  modified_base (5)..(5): 2'-OMe-nucleotide
  modified_base (6)..(6): 2'-fluoro-nucleotide
  modified_base (7)..(7): 2'-OMe-nucleotide
  modified_base (8)..(8): 2'-fluoro-nucleotide
  modified_base (9)..(9): 2'-OMe-nucleotide
  modified_base (10)..(10): 2'-fluoro-nucleotide
  modified_base (11)..(11): 2'-OMe-nucleotide
  modified_base (12)..(12): 2'-fluoro-nucleotide
  modified_base (13)..(13): 2'-OMe-nucleotide
  modified_base (14)..(14): 2'-fluoro-nucleotide
  modified_base (15)..(15): 2'-OMe-nucleotide
  modified_base (16)..(16): 2'-fluoro-nucleotide
  modified_base (17)..(17): 2'-OMe-nucleotide
  modified_base (18)..(18): 2'-fluoro-nucleotide
  modified_base (19)..(19): 2'-OMe-nucleotide
  modified_base (20)..(20): dT
  modified_base (21)..(21): dT
aaaucaaaauaagugcagatt

SEQ ID NO: 1195 - DNA, 21 bp, Artificial Sequence
  source: /note="Description of Artificial Sequence: Synthetic oligonucleotide"
  source: /note="Description of Combined DNA/RNA Molecule: Synthetic oligonucleotide"
  modified_base (1)..(1): 2'-fluoro-nucleotide
  modified_base (2)..(2): 2'-fluoro-nucleotide
  modified_base (3)..(3): 2'-OMe-nucleotide
  modified_base (4)..(4): 2'-fluoro-nucleotide
  modified_base (5)..(5): 2'-OMe-nucleotide
  modified_base (6)..(6): 2'-fluoro-nucleotide
  modified_base (7)..(7): 2'-OMe-nucleotide
  modified_base (8)..(8): 2'-fluoro-nucleotide
  modified_base (9)..(9): 2'-OMe-nucleotide
  modified_base (10)..(10): 2'-fluoro-nucleotide
  modified_base (11)..(11): 2'-OMe-nucleotide
  modified_base (12)..(12): 2'-fluoro-nucleotide
  modified_base (13)..(13): 2'-OMe-nucleotide
  modified_base (14)..(14): 2'-fluoro-nucleotide
  modified_base (15)..(15): 2'-OMe-nucleotide
  modified_base (16)..(16): 2'-fluoro-nucleotide
  modified_base (17)..(17): 2'-OMe-nucleotide
  modified_base (18)..(18): 2'-fluoro-nucleotide
  modified_base (19)..(19): 2'-OMe-nucleotide
  modified_base (20)..(20): dT
  modified_base (21)..(21): dT
caaaucaaaauaagugcagtt

SEQ ID NO: 1196 - DNA, 21 bp, Artificial Sequence
  source: /note="Description of Artificial Sequence: Synthetic oligonucleotide"
  source: /note="Description of Combined DNA/RNA Molecule: Synthetic oligonucleotide"
  modified_base (1)..(1): 2'-fluoro-nucleotide
  modified_base (2)..(2): 2'-fluoro-nucleotide
  modified_base (3)..(3): 2'-OMe-nucleotide
  modified_base (4)..(4): 2'-fluoro-nucleotide
  modified_base (5)..(5): 2'-OMe-nucleotide
  modified_base (6)..(6): 2'-fluoro-nucleotide
  modified_base (7)..(7): 2'-OMe-nucleotide
  modified_base (8)..(8): 2'-fluoro-nucleotide
  modified_base (9)..(9): 2'-OMe-nucleotide
  modified_base (10)..(10): 2'-fluoro-nucleotide
  modified_base (11)..(11): 2'-OMe-nucleotide
  modified_base (12)..(12): 2'-fluoro-nucleotide
  modified_base (13)..(13): 2'-OMe-nucleotide
  modified_base (14)..(14): 2'-fluoro-nucleotide
  modified_base (15)..(15): 2'-OMe-nucleotide
  modified_base (16)..(16): 2'-fluoro-nucleotide
  modified_base (17)..(17): 2'-OMe-nucleotide
  modified_base (18)..(18): 2'-fluoro-nucleotide
  modified_base (19)..(19): 2'-OMe-nucleotide
  modified_base (20)..(20): dT
  modified_base (21)..(21): dT
ucaaaucaaaauaagugcatt

SEQ ID NO: 1197 - DNA, 22 bp, Artificial Sequence
  source: /note="Description of Artificial Sequence: Synthetic oligonucleotide"
  source: /note="Description of Combined DNA/RNA Molecule: Synthetic oligonucleotide"
  modified_base (1)..(1): GalNAc-morpholino-thymidine analog 3
  modified_base (2)..(2): GalNAc-morpholino-thymidine analog 3
  modified_base (3)..(3): GalNAc-morpholino-thymidine analog 3
  modified_base (4)..(4): 2'-fluoro-nucleotide
  modified_base (5)..(5): 2'-OMe-nucleotide
  modified_base (6)..(6): 2'-fluoro-nucleotide
  modified_base (7)..(7): 2'-OMe-nucleotide
  modified_base (8)..(8): 2'-fluoro-nucleotide
  modified_base (9)..(9): 2'-OMe-nucleotide
  modified_base (10)..(10): 2'-fluoro-nucleotide
  modified_base (11)..(11): 2'-OMe-nucleotide
  modified_base (12)..(12): 2'-fluoro-nucleotide
  modified_base (13)..(13): 2'-OMe-nucleotide
  modified_base (14)..(14): 2'-fluoro-nucleotide
  modified_base (15)..(15): 2'-OMe-nucleotide
  modified_base (16)..(16): 2'-fluoro-nucleotide
  modified_base (17)..(17): 2'-OMe-nucleotide
  modified_base (18)..(18): 2'-fluoro-nucleotide
  modified_base (19)..(19): 2'-OMe-nucleotide
  modified_base (20)..(20): 2'-fluoro-nucleotide
  misc_feature (20)..(21): /note="phosphorothioate bond"
  modified_base (21)..(21): 2'-OMe-nucleotide
  misc_feature (21)..(22): /note="phosphorothioate bond"
  modified_base (22)..(22): 2'-fluoro-nucleotide
tttcagaguuaucgaggcacgu

SEQ ID NO: 1198 - DNA, 22 bp, Artificial Sequence
  source: /note="Description of Artificial Sequence: Synthetic oligonucleotide"
  source: /note="Description of Combined DNA/RNA Molecule: Synthetic oligonucleotide"
  modified_base (1)..(1): GalNAc-morpholino-thymidine analog 3
  modified_base (2)..(2): GalNAc-morpholino-thymidine analog 3
  modified_base (3)..(3): GalNAc-morpholino-thymidine analog 3
  modified_base (4)..(4): 2'-fluoro-nucleotide
  modified_base (5)..(5): 2'-OMe-nucleotide
  modified_base (6)..(6): 2'-fluoro-nucleotide
  modified_base (7)..(7): 2'-OMe-nucleotide
  modified_base (8)..(8): 2'-fluoro-nucleotide
  modified_base (9)..(9): 2'-OMe-nucleotide
  modified_base (10)..(10): 2'-fluoro-nucleotide
  modified_base (11)..(11): 2'-OMe-nucleotide
  modified_base (12)..(12): 2'-fluoro-nucleotide
  modified_base (13)..(13): 2'-OMe-nucleotide
  modified_base (14)..(14): 2'-fluoro-nucleotide
  modified_base (15)..(15): 2'-OMe-nucleotide
  modified_base (16)..(16): 2'-fluoro-nucleotide
  modified_base (17)..(17): 2'-OMe-nucleotide
  modified_base (18)..(18): 2'-fluoro-nucleotide
  modified_base (19)..(19): 2'-OMe-nucleotide
  modified_base (20)..(20): 2'-fluoro-nucleotide
  misc_feature (20)..(21): /note="phosphorothioate bond"
  modified_base (21)..(21): 2'-OMe-nucleotide
  misc_feature (21)..(22): /note="phosphorothioate bond"
  modified_base (22)..(22): 2'-fluoro-nucleotide
tttaguuaucgaggcacguacu

SEQ ID NO: 1199 - DNA, 22 bp, Artificial Sequence
  source: /note="Description of Artificial Sequence: Synthetic oligonucleotide"
  source: /note="Description of Combined DNA/RNA Molecule: Synthetic oligonucleotide"
  modified_base (1)..(1): GalNAc-morpholino-thymidine analog 3
  modified_base (2)..(2): GalNAc-morpholino-thymidine analog 3
  modified_base (3)..(3): GalNAc-morpholino-thymidine analog 3
  modified_base (4)..(4): 2'-fluoro-nucleotide
  modified_base (5)..(5): 2'-OMe-nucleotide
  modified_base (6)..(6): 2'-fluoro-nucleotide
  modified_base (7)..(7): 2'-OMe-nucleotide
  modified_base (8)..(8): 2'-fluoro-nucleotide
  modified_base (9)..(9): 2'-OMe-nucleotide
  modified_base (10)..(10): 2'-fluoro-nucleotide
  modified_base (11)..(11): 2'-OMe-nucleotide
  modified_base (12)..(12): 2'-fluoro-nucleotide
  modified_base (13)..(13): 2'-OMe-nucleotide
  modified_base (14)..(14): 2'-fluoro-nucleotide
  modified_base (15)..(15): 2'-OMe-nucleotide
  modified_base (16)..(16): 2'-fluoro-nucleotide
  modified_base (17)..(17): 2'-OMe-nucleotide
  modified_base (18)..(18): 2'-fluoro-nucleotide
  modified_base (19)..(19): 2'-OMe-nucleotide
  modified_base (20)..(20): 2'-fluoro-nucleotide
  misc_feature (20)..(21): /note="phosphorothioate bond"
  modified_base (21)..(21): 2'-OMe-nucleotide
  misc_feature (21)..(22): /note="phosphorothioate bond"
  modified_base (22)..(22): 2'-fluoro-nucleotide
tttauaggaccacagaaaacua

SEQ ID NO: 1200 - DNA, 22 bp, Artificial Sequence
  source: /note="Description of Artificial Sequence: Synthetic oligonucleotide"
  source: /note="Description of Combined DNA/RNA Molecule: Synthetic oligonucleotide"
  modified_base (1)..(1): GalNAc-morpholino-thymidine analog 3
  modified_base (2)..(2): GalNAc-morpholino-thymidine analog 3
  modified_base (3)..(3): GalNAc-morpholino-thymidine analog 3
  modified_base (4)..(4): 2'-fluoro-nucleotide
  modified_base (5)..(5): 2'-OMe-nucleotide
  modified_base (6)..(6): 2'-fluoro-nucleotide
  modified_base (7)..(7): 2'-OMe-nucleotide
  modified_base (8)..(8): 2'-fluoro-nucleotide
  modified_base (9)..(9): 2'-OMe-nucleotide
  modified_base (10)..(10): 2'-fluoro-nucleotide
  modified_base (11)..(11): 2'-OMe-nucleotide
  modified_base (12)..(12): 2'-fluoro-nucleotide
  modified_base (13)..(13): 2'-OMe-nucleotide
  modified_base (14)..(14): 2'-fluoro-nucleotide
  modified_base (15)..(15): 2'-OMe-nucleotide
  modified_base (16)..(16): 2'-fluoro-nucleotide
  modified_base (17)..(17): 2'-OMe-nucleotide
  modified_base (18)..(18): 2'-fluoro-nucleotide
  modified_base (19)..(19): 2'-OMe-nucleotide
  modified_base (20)..(20): 2'-fluoro-nucleotide
  misc_feature (20)..(21): /note="phosphorothioate bond"
  modified_base (21)..(21): 2'-OMe-nucleotide
  misc_feature (21)..(22): /note="phosphorothioate bond"
  modified_base (22)..(22): 2'-fluoro-nucleotide
tttcgguaauggacagaguuau

SEQ ID NO: 1201 - DNA, 22 bp, Artificial Sequence
  source: /note="Description of Artificial Sequence: Synthetic oligonucleotide"
  source: /note="Description of Combined DNA/RNA Molecule: Synthetic oligonucleotide"
  modified_base (1)..(1): GalNAc-morpholino-thymidine analog 3
  modified_base (2)..(2): GalNAc-morpholino-thymidine analog 3
  modified_base (3)..(3): GalNAc-morpholino-thymidine analog 3
  modified_base (4)..(4): 2'-fluoro-nucleotide
  modified_base (5)..(5): 2'-OMe-nucleotide
  modified_base (6)..(6): 2'-fluoro-nucleotide
  modified_base (7)..(7): 2'-OMe-nucleotide
  modified_base (8)..(8): 2'-fluoro-nucleotide
  modified_base (9)..(9): 2'-OMe-nucleotide
  modified_base (10)..(10): 2'-fluoro-nucleotide
  modified_base (11)..(11): 2'-OMe-nucleotide
  modified_base (12)..(12): 2'-fluoro-nucleotide
  modified_base (13)..(13): 2'-OMe-nucleotide
  modified_base (14)..(14): 2'-fluoro-nucleotide
  modified_base (15)..(15): 2'-OMe-nucleotide
  modified_base (16)..(16): 2'-fluoro-nucleotide
  modified_base (17)..(17): 2'-OMe-nucleotide
  modified_base (18)..(18): 2'-fluoro-nucleotide
  modified_base (19)..(19): 2'-OMe-nucleotide
  modified_base (20)..(20): 2'-fluoro-nucleotide
  misc_feature (20)..(21): /note="phosphorothioate bond"
  modified_base (21)..(21): 2'-OMe-nucleotide
  misc_feature (21)..(22): /note="phosphorothioate bond"
  modified_base (22)..(22): 2'-fluoro-nucleotide
tttcggaaauggacagaguuau

SEQ ID NO: 1202 - DNA, 22 bp, Artificial Sequence
  source: /note="Description of Artificial Sequence: Synthetic oligonucleotide"
  source: /note="Description of Combined DNA/RNA Molecule: Synthetic oligonucleotide"
  modified_base (1)..(1): GalNAc-morpholino-thymidine analog 3
  modified_base (2)..(2): GalNAc-morpholino-thymidine analog 3
  modified_base (3)..(3): GalNAc-morpholino-thymidine analog 3
  modified_base (4)..(4): 2'-fluoro-nucleotide
  modified_base (5)..(5): 2'-OMe-nucleotide
  modified_base (6)..(6): 2'-fluoro-nucleotide
  modified_base (7)..(7): 2'-OMe-nucleotide
  modified_base (8)..(8): 2'-fluoro-nucleotide
  modified_base (9)..(9): 2'-OMe-nucleotide
  modified_base (10)..(10): 2'-fluoro-nucleotide
  modified_base (11)..(11): 2'-OMe-nucleotide
  modified_base (12)..(12): 2'-fluoro-nucleotide
  modified_base (13)..(13): 2'-OMe-nucleotide
  modified_base (14)..(14): 2'-fluoro-nucleotide
  modified_base (15)..(15): 2'-OMe-nucleotide
  modified_base (16)..(16): 2'-fluoro-nucleotide
  modified_base (17)..(17): 2'-OMe-nucleotide
  modified_base (18)..(18): 2'-fluoro-nucleotide
  modified_base (19)..(19): 2'-OMe-nucleotide
  modified_base (20)..(20): 2'-fluoro-nucleotide
  misc_feature (20)..(21): /note="phosphorothioate bond"
  modified_base (21)..(21): 2'-OMe-nucleotide
  misc_feature (21)..(22): /note="phosphorothioate bond"
  modified_base (22)..(22): 2'-fluoro-nucleotide
tttggacagaguuaucaaggca

SEQ ID NO: 1203 - DNA, 22 bp, Artificial Sequence
  source: /note="Description of Artificial Sequence: Synthetic oligonucleotide"
  source: /note="Description of Combined DNA/RNA Molecule: Synthetic oligonucleotide"
  modified_base (1)..(1): GalNAc-morpholino-thymidine analog 3
  modified_base (2)..(2): GalNAc-morpholino-thymidine analog 3
  modified_base (3)..(3): GalNAc-morpholino-thymidine analog 3
  modified_base (4)..(4): 2'-fluoro-nucleotide
  modified_base (5)..(5): 2'-OMe-nucleotide
  modified_base (6)..(6): 2'-fluoro-nucleotide
  modified_base (7)..(7): 2'-OMe-nucleotide
  modified_base (8)..(8): 2'-fluoro-nucleotide
  modified_base (9)..(9): 2'-OMe-nucleotide
  modified_base (10)..(10): 2'-fluoro-nucleotide
  modified_base (11)..(11): 2'-OMe-nucleotide
  modified_base (12)..(12): 2'-fluoro-nucleotide
  modified_base (13)..(13): 2'-OMe-nucleotide
  modified_base (14)..(14): 2'-fluoro-nucleotide
  modified_base (15)..(15): 2'-OMe-nucleotide
  modified_base (16)..(16): 2'-fluoro-nucleotide
  modified_base (17)..(17): 2'-OMe-nucleotide
  modified_base (18)..(18): 2'-fluoro-nucleotide
  modified_base (19)..(19): 2'-OMe-nucleotide
  modified_base (20)..(20): 2'-fluoro-nucleotide
  misc_feature (20)..(21): /note="phosphorothioate bond"
  modified_base (21)..(21): 2'-OMe-nucleotide
  misc_feature (21)..(22): /note="phosphorothioate bond"
  modified_base (22)..(22): 2'-fluoro-nucleotide
tttgacagaguuaucaaggcac

SEQ ID NO: 1204 - DNA, 22 bp, Artificial Sequence
  source: /note="Description of Artificial Sequence: Synthetic oligonucleotide"
  source: /note="Description of Combined DNA/RNA Molecule: Synthetic oligonucleotide"
  modified_base (1)..(1): GalNAc-morpholino-thymidine analog 3
  modified_base (2)..(2): GalNAc-morpholino-thymidine analog 3
  modified_base (3)..(3): GalNAc-morpholino-thymidine analog 3
  modified_base (4)..(4): 2'-fluoro-nucleotide
  modified_base (5)..(5): 2'-OMe-nucleotide
  modified_base (6)..(6): 2'-fluoro-nucleotide
  modified_base (7)..(7): 2'-OMe-nucleotide
  modified_base (8)..(8): 2'-fluoro-nucleotide
  modified_base (9)..(9): 2'-OMe-nucleotide
  modified_base (10)..(10): 2'-fluoro-nucleotide
  modified_base (11)..(11): 2'-OMe-nucleotide
  modified_base (12)..(12): 2'-fluoro-nucleotide
  modified_base (13)..(13): 2'-OMe-nucleotide
  modified_base (14)..(14): 2'-fluoro-nucleotide
  modified_base (15)..(15): 2'-OMe-nucleotide
  modified_base (16)..(16): 2'-fluoro-nucleotide
  modified_base (17)..(17): 2'-OMe-nucleotide
  modified_base (18)..(18): 2'-fluoro-nucleotide
  modified_base (19)..(19): 2'-OMe-nucleotide
  modified_base (20)..(20): 2'-fluoro-nucleotide
  misc_feature (20)..(21): /note="phosphorothioate bond"
  modified_base (21)..(21): 2'-OMe-nucleotide
  misc_feature (21)..(22): /note="phosphorothioate bond"
  modified_base (22)..(22): 2'-fluoro-nucleotide
tttgaguuaucaaggcacauac

SEQ ID NO: 1205 - DNA, 22 bp, Artificial Sequence
  source: /note="Description of Artificial Sequence: Synthetic oligonucleotide"
  source: /note="Description of Combined DNA/RNA Molecule: Synthetic oligonucleotide"
  modified_base (1)..(1): GalNAc-morpholino-thymidine analog 3
  modified_base (2)..(2): GalNAc-morpholino-thymidine analog 3
  modified_base (3)..(3): GalNAc-morpholino-thymidine analog 3
  modified_base (4)..(4): 2'-fluoro-nucleotide
  modified_base (5)..(5): 2'-OMe-nucleotide
  modified_base (6)..(6): 2'-fluoro-nucleotide
  modified_base (7)..(7): 2'-OMe-nucleotide
  modified_base (8)..(8): 2'-fluoro-nucleotide
  modified_base (9)..(9): 2'-OMe-nucleotide
  modified_base (10)..(10): 2'-fluoro-nucleotide
  modified_base (11)..(11): 2'-OMe-nucleotide
  modified_base (12)..(12): 2'-fluoro-nucleotide
  modified_base (13)..(13): 2'-OMe-nucleotide
  modified_base (14)..(14): 2'-fluoro-nucleotide
  modified_base (15)..(15): 2'-OMe-nucleotide
  modified_base (16)..(16): 2'-fluoro-nucleotide
  modified_base (17)..(17): 2'-OMe-nucleotide
  modified_base (18)..(18): 2'-fluoro-nucleotide
  modified_base (19)..(19): 2'-OMe-nucleotide
  modified_base (20)..(20): 2'-fluoro-nucleotide
  misc_feature (20)..(21): /note="phosphorothioate bond"
  modified_base (21)..(21): 2'-OMe-nucleotide
  misc_feature (21)..(22): /note="phosphorothioate bond"
  modified_base (22)..(22): 2'-fluoro-nucleotide
tttaguuaucaaggcacauacu

SEQ ID NO: 1206 - DNA, 22 bp, Artificial Sequence
  source: /note="Description of Artificial Sequence: Synthetic oligonucleotide"
  source: /note="Description of Combined DNA/RNA Molecule: Synthetic oligonucleotide"
  modified_base (1)..(1): GalNAc-morpholino-thymidine analog 3
  modified_base (2)..(2): GalNAc-morpholino-thymidine analog 3
  modified_base (3)..(3): GalNAc-morpholino-thymidine analog 3
  modified_base (4)..(4): 2'-fluoro-nucleotide
  modified_base (5)..(5): 2'-OMe-nucleotide
  modified_base (6)..(6): 2'-fluoro-nucleotide
  modified_base (7)..(7): 2'-OMe-nucleotide
  modified_base (8)..(8): 2'-fluoro-nucleotide
  modified_base (9)..(9): 2'-OMe-nucleotide
  modified_base (10)..(10): 2'-fluoro-nucleotide
  modified_base (11)..(11): 2'-OMe-nucleotide
  modified_base (12)..(12): 2'-fluoro-nucleotide
  modified_base (13)..(13): 2'-OMe-nucleotide
  modified_base (14)..(14): 2'-fluoro-nucleotide
  modified_base (15)..(15): 2'-OMe-nucleotide
  modified_base (16)..(16): 2'-fluoro-nucleotide
  modified_base (17)..(17): 2'-OMe-nucleotide
  modified_base (18)..(18): 2'-fluoro-nucleotide
  modified_base (19)..(19): 2'-OMe-nucleotide
  modified_base (20)..(20): 2'-fluoro-nucleotide
  misc_feature (20)..(21): /note="phosphorothioate bond"
  modified_base (21)..(21): 2'-OMe-nucleotide
  misc_feature (21)..(22): /note="phosphorothioate bond"
  modified_base (22)..(22): 2'-fluoro-nucleotide
tttugauggacggaguuaucga

SEQ ID NO: 1207 - DNA, 22 bp, Artificial Sequence
  source: /note="Description of Artificial Sequence: Synthetic oligonucleotide"
  source: /note="Description of Combined DNA/RNA Molecule: Synthetic oligonucleotide"
  modified_base (1)..(1): GalNAc-morpholino-thymidine analog 3
  modified_base (2)..(2): GalNAc-morpholino-thymidine analog 3
  modified_base (3)..(3): GalNAc-morpholino-thymidine analog 3
  modified_base (4)..(4): 2'-fluoro-nucleotide
  modified_base (5)..(5): 2'-OMe-nucleotide
  modified_base (6)..(6): 2'-fluoro-nucleotide
  modified_base (7)..(7): 2'-OMe-nucleotide
  modified_base (8)..(8): 2'-fluoro-nucleotide
  modified_base (9)..(9): 2'-OMe-nucleotide
  modified_base (10)..(10): 2'-fluoro-nucleotide
  modified_base (11)..(11): 2'-OMe-nucleotide
  modified_base (12)..(12): 2'-fluoro-nucleotide
  modified_base (13)..(13): 2'-OMe-nucleotide
  modified_base (14)..(14): 2'-fluoro-nucleotide
  modified_base (15)..(15): 2'-OMe-nucleotide
  modified_base (16)..(16): 2'-fluoro-nucleotide
  modified_base (17)..(17): 2'-OMe-nucleotide
  modified_base (18)..(18): 2'-fluoro-nucleotide
  modified_base (19)..(19): 2'-OMe-nucleotide
  modified_base (20)..(20): 2'-fluoro-nucleotide
  misc_feature (20)..(21): /note="phosphorothioate bond"
  modified_base (21)..(21): 2'-OMe-nucleotide
  misc_feature (21)..(22): /note="phosphorothioate bond"
  modified_base (22)..(22): 2'-fluoro-nucleotide
tttgauggacggaguuaucgag

SEQ ID NO: 1208 - DNA, 22 bp, Artificial Sequence
  source: /note="Description of Artificial Sequence: Synthetic oligonucleotide"
  source: /note="Description of Combined DNA/RNA Molecule: Synthetic oligonucleotide"
  modified_base (1)..(1): GalNAc-morpholino-thymidine analog 3
  modified_base (2)..(2): GalNAc-morpholino-thymidine analog 3
  modified_base (3)..(3): GalNAc-morpholino-thymidine analog 3
  modified_base (4)..(4): 2'-fluoro-nucleotide
  modified_base (5)..(5): 2'-OMe-nucleotide
  modified_base (6)..(6): 2'-fluoro-nucleotide
  modified_base (7)..(7): 2'-OMe-nucleotide
  modified_base (8)..(8): 2'-fluoro-nucleotide
  modified_base (9)..(9): 2'-OMe-nucleotide
  modified_base (10)..(10): 2'-fluoro-nucleotide
  modified_base (11)..(11): 2'-OMe-nucleotide
  modified_base (12)..(12): 2'-fluoro-nucleotide
  modified_base (13)..(13): 2'-OMe-nucleotide
  modified_base (14)..(14): 2'-fluoro-nucleotide
  modified_base (15)..(15): 2'-OMe-nucleotide
  modified_base (16)..(16): 2'-fluoro-nucleotide
  modified_base (17)..(17): 2'-OMe-nucleotide
  modified_base (18)..(18): 2'-fluoro-nucleotide
  modified_base (19)..(19): 2'-OMe-nucleotide
  modified_base (20)..(20): 2'-fluoro-nucleotide
  misc_feature (20)..(21): /note="phosphorothioate bond"
  modified_base (21)..(21): 2'-OMe-nucleotide
  misc_feature (21)..(22): /note="phosphorothioate bond"
  modified_base (22)..(22): 2'-fluoro-nucleotide
tttggacggaguuaucgaggca

SEQ ID NO: 1209 - DNA, 22 bp, Artificial Sequence
  source: /note="Description of Artificial Sequence: Synthetic oligonucleotide"
  source: /note="Description of Combined DNA/RNA Molecule: Synthetic oligonucleotide"
  modified_base (1)..(1): GalNAc-morpholino-thymidine analog 3
  modified_base (2)..(2): GalNAc-morpholino-thymidine analog 3
  modified_base (3)..(3): GalNAc-morpholino-thymidine analog 3
  modified_base (4)..(4): 2'-fluoro-nucleotide
  modified_base (5)..(5): 2'-OMe-nucleotide
  modified_base (6)..(6): 2'-fluoro-nucleotide
  modified_base (7)..(7): 2'-OMe-nucleotide
  modified_base (8)..(8): 2'-fluoro-nucleotide
  modified_base (9)..(9): 2'-OMe-nucleotide
  modified_base (10)..(10): 2'-fluoro-nucleotide
  modified_base (11)..(11): 2'-OMe-nucleotide
  modified_base (12)..(12): 2'-fluoro-nucleotide
  modified_base (13)..(13): 2'-OMe-nucleotide
  modified_base (14)..(14): 2'-fluoro-nucleotide
  modified_base (15)..(15): 2'-OMe-nucleotide
  modified_base (16)..(16): 2'-fluoro-nucleotide
  modified_base (17)..(17): 2'-OMe-nucleotide
  modified_base (18)..(18): 2'-fluoro-nucleotide
  modified_base (19)..(19): 2'-OMe-nucleotide
  modified_base (20)..(20): 2'-fluoro-nucleotide
  misc_feature (20)..(21): /note="phosphorothioate bond"
  modified_base (21)..(21): 2'-OMe-nucleotide
  misc_feature (21)..(22): /note="phosphorothioate bond"
  modified_base (22)..(22): 2'-fluoro-nucleotide
tttcaaucugacacaaugcuca

SEQ ID NO: 1210 - DNA, 22 bp, Artificial Sequence
  source: /note="Description of Artificial Sequence: Synthetic oligonucleotide"
  source: /note="Description of Combined DNA/RNA Molecule: Synthetic oligonucleotide"
  modified_base (1)..(1): GalNAc-morpholino-thymidine analog 3
  modified_base (2)..(2): GalNAc-morpholino-thymidine analog 3
  modified_base (3)..(3): GalNAc-morpholino-thymidine analog 3
  modified_base (4)..(4): 2'-fluoro-nucleotide
  modified_base (5)..(5): 2'-OMe-nucleotide
  modified_base (6)..(6): 2'-fluoro-nucleotide
  modified_base (7)..(7): 2'-OMe-nucleotide
  modified_base (8)..(8): 2'-fluoro-nucleotide
  modified_base (9)..(9): 2'-OMe-nucleotide
  modified_base (10)..(10): 2'-fluoro-nucleotide
  modified_base (11)..(11): 2'-OMe-nucleotide
  modified_base (12)..(12): 2'-fluoro-nucleotide
  modified_base (13)..(13): 2'-OMe-nucleotide
  modified_base (14)..(14): 2'-fluoro-nucleotide
  modified_base (15)..(15): 2'-OMe-nucleotide
  modified_base (16)..(16): 2'-fluoro-nucleotide
  modified_base (17)..(17): 2'-OMe-nucleotide
  modified_base (18)..(18): 2'-fluoro-nucleotide
  modified_base (19)..(19): 2'-OMe-nucleotide
  modified_base (20)..(20): 2'-fluoro-nucleotide
  misc_feature (20)..(21): /note="phosphorothioate bond"
  modified_base (21)..(21): 2'-OMe-nucleotide
  misc_feature (21)..(22): /note="phosphorothioate bond"
  modified_base (22)..(22): 2'-fluoro-nucleotide
tttuggccagaguuaucgaggc

SEQ ID NO: 1211 - DNA, 22 bp, Artificial Sequence
  source: /note="Description of Artificial Sequence: Synthetic oligonucleotide"
  source: /note="Description of Combined DNA/RNA Molecule: Synthetic oligonucleotide"
  modified_base (1)..(1): GalNAc-morpholino-thymidine analog 3
  modified_base (2)..(2): GalNAc-morpholino-thymidine analog 3
  modified_base (3)..(3): GalNAc-morpholino-thymidine analog 3
  modified_base (4)..(4): 2'-fluoro-nucleotide
  modified_base (5)..(5): 2'-OMe-nucleotide
  modified_base (6)..(6): 2'-fluoro-nucleotide
  modified_base (7)..(7): 2'-OMe-nucleotide
  modified_base (8)..(8): 2'-fluoro-nucleotide
  modified_base (9)..(9): 2'-OMe-nucleotide
  modified_base (10)..(10): 2'-fluoro-nucleotide
  modified_base (11)..(11): 2'-OMe-nucleotide
  modified_base (12)..(12): 2'-fluoro-nucleotide
  modified_base (13)..(13): 2'-OMe-nucleotide
  modified_base (14)..(14): 2'-fluoro-nucleotide
  modified_base (15)..(15): 2'-OMe-nucleotide
  modified_base (16)..(16): 2'-fluoro-nucleotide
  modified_base (17)..(17): 2'-OMe-nucleotide
  modified_base (18)..(18): 2'-fluoro-nucleotide
  modified_base (19)..(19): 2'-OMe-nucleotide
  modified_base (20)..(20): 2'-fluoro-nucleotide
  misc_feature (20)..(21): /note="phosphorothioate bond"
  modified_base (21)..(21): 2'-OMe-nucleotide
  misc_feature (21)..(22): /note="phosphorothioate bond"
  modified_base (22)..(22): 2'-fluoro-nucleotide
tttgccagaguuaucgaggcac

SEQ ID NO: 1212 - DNA, 22 bp, Artificial Sequence
  source: /note="Description of Artificial Sequence: Synthetic oligonucleotide"
  source: /note="Description of Combined DNA/RNA Molecule: Synthetic oligonucleotide"
  modified_base (1)..(1): GalNAc-morpholino-thymidine analog 3
  modified_base (2)..(2): GalNAc-morpholino-thymidine analog 3
  modified_base (3)..(3): GalNAc-morpholino-thymidine analog 3
  modified_base (4)..(4): 2'-fluoro-nucleotide
  modified_base (5)..(5): 2'-OMe-nucleotide
  modified_base (6)..(6): 2'-fluoro-nucleotide
  modified_base (7)..(7): 2'-OMe-nucleotide
  modified_base (8)..(8): 2'-fluoro-nucleotide
  modified_base (9)..(9): 2'-OMe-nucleotide
  modified_base (10)..(10): 2'-fluoro-nucleotide
  modified_base (11)..(11): 2'-OMe-nucleotide
  modified_base (12)..(12): 2'-fluoro-nucleotide
  modified_base (13)..(13): 2'-OMe-nucleotide
  modified_base (14)..(14): 2'-fluoro-nucleotide
  modified_base (15)..(15): 2'-OMe-nucleotide
  modified_base (16)..(16): 2'-fluoro-nucleotide
  modified_base (17)..(17): 2'-OMe-nucleotide
  modified_base (18)..(18): 2'-fluoro-nucleotide
  modified_base (19)..(19): 2'-OMe-nucleotide
  modified_base (20)..(20): 2'-fluoro-nucleotide
  misc_feature (20)..(21): /note="phosphorothioate bond"
  modified_base (21)..(21): 2'-OMe-nucleotide
  misc_feature (21)..(22): /note="phosphorothioate bond"
  modified_base (22)..(22): 2'-fluoro-nucleotide
tttguauuuuuguguauaagcu

SEQ ID NO: 1213 - DNA, 22 bp, Artificial Sequence
  source: /note="Description of Artificial Sequence: Synthetic oligonucleotide"
  source: /note="Description of Combined DNA/RNA Molecule: Synthetic oligonucleotide"
  modified_base (1)..(1): GalNAc-morpholino-thymidine analog 3
  modified_base (2)..(2): GalNAc-morpholino-thymidine analog 3
  modified_base (3)..(3): GalNAc-morpholino-thymidine analog 3
  modified_base (4)..(4): 2'-fluoro-nucleotide
  modified_base (5)..(5): 2'-OMe-nucleotide
  modified_base (6)..(6): 2'-fluoro-nucleotide
  modified_base (7)..(7): 2'-OMe-nucleotide
  modified_base (8)..(8): 2'-fluoro-nucleotide
  modified_base (9)..(9): 2'-OMe-nucleotide
  modified_base (10)..(10): 2'-fluoro-nucleotide
  modified_base (11)..(11): 2'-OMe-nucleotide
  modified_base (12)..(12): 2'-fluoro-nucleotide
  modified_base (13)..(13): 2'-OMe-nucleotide
  modified_base (14)..(14): 2'-fluoro-nucleotide
  modified_base (15)..(15): 2'-OMe-nucleotide
  modified_base (16)..(16): 2'-fluoro-nucleotide
  modified_base (17)..(17): 2'-OMe-nucleotide
  modified_base (18)..(18): 2'-fluoro-nucleotide
  modified_base (19)..(19): 2'-OMe-nucleotide
  modified_base (20)..(20): 2'-fluoro-nucleotide
  misc_feature (20)..(21): /note="phosphorothioate bond"
  modified_base (21)..(21): 2'-OMe-nucleotide
  misc_feature (21)..(22): /note="phosphorothioate bond"
  modified_base (22)..(22): 2'-fluoro-nucleotide
tttcugcacuuauuuugauuug

SEQ ID NO: 1214 - DNA, 21 bp, Artificial Sequence
  source: /note="Description of Artificial Sequence: Synthetic oligonucleotide"
  source: /note="Description of Combined DNA/RNA Molecule: Synthetic oligonucleotide"
  modified_base (1)..(1): 2'-fluoro-nucleotide
  misc_feature (1)..(2): /note="phosphorothioate bond"
  modified_base (2)..(2): 2'-fluoro-nucleotide
  misc_feature (2)..(3): /note="phosphorothioate bond"
  modified_base (3)..(3): 2'-OMe-nucleotide
  modified_base (4)..(4): 2'-fluoro-nucleotide
  modified_base (5)..(5): 2'-OMe-nucleotide
  modified_base (6)..(6): 2'-fluoro-nucleotide
  modified_base (7)..(7): 2'-OMe-nucleotide
  modified_base (8)..(8): 2'-fluoro-nucleotide
  modified_base (9)..(9): 2'-OMe-nucleotide
  modified_base (10)..(10): 2'-fluoro-nucleotide
  modified_base (11)..(11): 2'-OMe-nucleotide
  modified_base (12)..(12): 2'-fluoro-nucleotide
  modified_base (13)..(13): 2'-OMe-nucleotide
  modified_base (14)..(14): 2'-fluoro-nucleotide
  modified_base (15)..(15): 2'-OMe-nucleotide
  modified_base (16)..(16): 2'-fluoro-nucleotide
  modified_base (17)..(17): 2'-OMe-nucleotide
  modified_base (18)..(18): 2'-fluoro-nucleotide
  modified_base (19)..(19): 2'-OMe-nucleotide
  misc_feature (19)..(20): /note="phosphorothioate bond"
  modified_base (20)..(20): dT
  misc_feature (20)..(21): /note="phosphorothioate bond"
  modified_base (21)..(21): dT
acgugccucgauaacucugtt

SEQ ID NO: 1215 - DNA, 21 bp, Artificial Sequence
  source: /note="Description of Artificial Sequence: Synthetic oligonucleotide"
  source: /note="Description of Combined DNA/RNA Molecule: Synthetic oligonucleotide"
  modified_base (1)..(1): 2'-fluoro-nucleotide
  misc_feature (1)..(2): /note="phosphorothioate bond"
  modified_base (2)..(2): 2'-fluoro-nucleotide
  misc_feature (2)..(3): /note="phosphorothioate bond"
  modified_base (3)..(3): 2'-OMe-nucleotide
  modified_base (4)..(4): 2'-fluoro-nucleotide
  modified_base (5)..(5): 2'-OMe-nucleotide
  modified_base (6)..(6): 2'-fluoro-nucleotide
  modified_base (7)..(7): 2'-OMe-nucleotide
  modified_base (8)..(8): 2'-fluoro-nucleotide
  modified_base (9)..(9): 2'-OMe-nucleotide
  modified_base (10)..(10): 2'-fluoro-nucleotide
  modified_base (11)..(11): 2'-OMe-nucleotide
  modified_base (12)..(12): 2'-fluoro-nucleotide
  modified_base (13)..(13): 2'-OMe-nucleotide
  modified_base (14)..(14): 2'-fluoro-nucleotide
  modified_base (15)..(15): 2'-OMe-nucleotide
  modified_base (16)..(16): 2'-fluoro-nucleotide
  modified_base (17)..(17): 2'-OMe-nucleotide
  modified_base (18)..(18): 2'-fluoro-nucleotide
  modified_base (19)..(19): 2'-OMe-nucleotide
  misc_feature (19)..(20): /note="phosphorothioate bond"
  modified_base (20)..(20): dT
  misc_feature (20)..(21): /note="phosphorothioate bond"
  modified_base (21)..(21): dT
aguacgugccucgauaacutt

SEQ ID NO: 1216 - DNA, 21 bp, Artificial Sequence
  source: /note="Description of Artificial Sequence: Synthetic oligonucleotide"
  source: /note="Description of Combined DNA/RNA Molecule: Synthetic oligonucleotide"
  modified_base (1)..(1): 2'-fluoro-nucleotide
  misc_feature (1)..(2): /note="phosphorothioate bond"
  modified_base (2)..(2): 2'-fluoro-nucleotide
  misc_feature (2)..(3): /note="phosphorothioate bond"
  modified_base (3)..(3): 2'-OMe-nucleotide
  modified_base (4)..(4): 2'-fluoro-nucleotide
  modified_base (5)..(5): 2'-OMe-nucleotide
  modified_base (6)..(6): 2'-fluoro-nucleotide
  modified_base (7)..(7): 2'-OMe-nucleotide
  modified_base (8)..(8): 2'-fluoro-nucleotide
  modified_base (9)..(9): 2'-OMe-nucleotide
  modified_base (10)..(10): 2'-fluoro-nucleotide
  modified_base (11)..(11): 2'-OMe-nucleotide
  modified_base (12)..(12): 2'-fluoro-nucleotide
  modified_base (13)..(13): 2'-OMe-nucleotide
  modified_base (14)..(14): 2'-fluoro-nucleotide
  modified_base (15)..(15): 2'-OMe-nucleotide
  modified_base (16)..(16): 2'-fluoro-nucleotide
  modified_base (17)..(17): 2'-OMe-nucleotide
  modified_base (18)..(18): 2'-fluoro-nucleotide
  modified_base (19)..(19): 2'-OMe-nucleotide
  misc_feature (19)..(20): /note="phosphorothioate bond"
  modified_base (20)..(20): dT
  misc_feature (20)..(21): /note="phosphorothioate bond"
  modified_base (21)..(21): dT
uaguuuucugugguccuautt

SEQ ID NO: 1217 - DNA, 21 bp, Artificial Sequence
  source: /note="Description of Artificial Sequence: Synthetic oligonucleotide"
  source: /note="Description of Combined DNA/RNA Molecule: Synthetic oligonucleotide"
  modified_base (1)..(1): 2'-fluoro-nucleotide
  misc_feature (1)..(2): /note="phosphorothioate bond"
  modified_base (2)..(2): 2'-fluoro-nucleotide
  misc_feature (2)..(3): /note="phosphorothioate bond"
  modified_base (3)..(3): 2'-OMe-nucleotide
  modified_base (4)..(4): 2'-fluoro-nucleotide
  modified_base (5)..(5): 2'-OMe-nucleotide
  modified_base (6)..(6): 2'-fluoro-nucleotide
  modified_base (7)..(7): 2'-OMe-nucleotide
  modified_base (8)..(8): 2'-fluoro-nucleotide
  modified_base (9)..(9): 2'-OMe-nucleotide
  modified_base (10)..(10): 2'-fluoro-nucleotide
  modified_base (11)..(11): 2'-OMe-nucleotide
  modified_base (12)..(12): 2'-fluoro-nucleotide
  modified_base (13)..(13): 2'-OMe-nucleotide
  modified_base (14)..(14): 2'-fluoro-nucleotide
  modified_base (15)..(15): 2'-OMe-nucleotide
  modified_base (16)..(16): 2'-fluoro-nucleotide
  modified_base (17)..(17): 2'-OMe-nucleotide
  modified_base (18)..(18): 2'-fluoro-nucleotide
  modified_base (19)..(19): 2'-OMe-nucleotide
  misc_feature (19)..(20): /note="phosphorothioate bond"
  modified_base (20)..(20): dT
  misc_feature (20)..(21): /note="phosphorothioate bond"
  modified_base (21)..(21): dT
auaacucuguccauuaccgtt

SEQ ID NO: 1218 - DNA, 21 bp, Artificial Sequence
  source: /note="Description of Artificial Sequence: Synthetic oligonucleotide"
  source: /note="Description of Combined DNA/RNA Molecule: Synthetic oligonucleotide"
  modified_base (1)..(1): 2'-fluoro-nucleotide
  misc_feature (1)..(2): /note="phosphorothioate bond"
  modified_base (2)..(2): 2'-fluoro-nucleotide
  misc_feature (2)..(3): /note="phosphorothioate bond"
  modified_base (3)..(3): 2'-OMe-nucleotide
  modified_base (4)..(4): 2'-fluoro-nucleotide
  modified_base (5)..(5): 2'-OMe-nucleotide
  modified_base (6)..(6): 2'-fluoro-nucleotide
  modified_base (7)..(7): 2'-OMe-nucleotide
  modified_base (8)..(8): 2'-fluoro-nucleotide
  modified_base (9)..(9): 2'-OMe-nucleotide
  modified_base (10)..(10): 2'-fluoro-nucleotide
  modified_base (11)..(11): 2'-OMe-nucleotide
  modified_base (12)..(12): 2'-fluoro-nucleotide
  modified_base (13)..(13): 2'-OMe-nucleotide
  modified_base (14)..(14): 2'-fluoro-nucleotide
  modified_base (15)..(15): 2'-OMe-nucleotide
  modified_base (16)..(16): 2'-fluoro-nucleotide
  modified_base (17)..(17): 2'-OMe-nucleotide
  modified_base (18)..(18): 2'-fluoro-nucleotide
  modified_base (19)..(19): 2'-OMe-nucleotide
  misc_feature (19)..(20): /note="phosphorothioate bond"
  modified_base (20)..(20): dT
  misc_feature (20)..(21): /note="phosphorothioate bond"
  modified_base (21)..(21): dT
auaacucuguccauuuccgtt

SEQ ID NO: 1219 - DNA, 21 bp, Artificial Sequence
  source: /note="Description of Artificial Sequence: Synthetic oligonucleotide"
  source: /note="Description of Combined DNA/RNA Molecule: Synthetic oligonucleotide"
  modified_base (1)..(1): 2'-fluoro-nucleotide
  misc_feature (1)..(2): /note="phosphorothioate bond"
  modified_base (2)..(2): 2'-fluoro-nucleotide
  misc_feature (2)..(3): /note="phosphorothioate bond"
  modified_base (3)..(3): 2'-OMe-nucleotide
  modified_base (4)..(4): 2'-fluoro-nucleotide
  modified_base (5)..(5): 2'-OMe-nucleotide
  modified_base (6)..(6): 2'-fluoro-nucleotide
  modified_base (7)..(7): 2'-OMe-nucleotide
  modified_base (8)..(8): 2'-fluoro-nucleotide
  modified_base (9)..(9): 2'-OMe-nucleotide
  modified_base (10)..(10): 2'-fluoro-nucleotide
  modified_base (11)..(11): 2'-OMe-nucleotide
  modified_base (12)..(12): 2'-fluoro-nucleotide
  modified_base (13)..(13): 2'-OMe-nucleotide
  modified_base (14)..(14): 2'-fluoro-nucleotide
  modified_base (15)..(15): 2'-OMe-nucleotide
  modified_base (16)..(16): 2'-fluoro-nucleotide
  modified_base (17)..(17): 2'-OMe-nucleotide
  modified_base (18)..(18): 2'-fluoro-nucleotide
  modified_base (19)..(19): 2'-OMe-nucleotide
  misc_feature (19)..(20): /note="phosphorothioate bond"
  modified_base (20)..(20): dT
  misc_feature (20)..(21): /note="phosphorothioate bond"
  modified_base (21)..(21): dT
ugccuugauaacucugucctt

SEQ ID NO: 1220 - DNA, 21 bp, Artificial Sequence
  source: /note="Description of Artificial Sequence: Synthetic oligonucleotide"
  source: /note="Description of Combined DNA/RNA Molecule: Synthetic oligonucleotide"
  modified_base (1)..(1): 2'-fluoro-nucleotide
  misc_feature (1)..(2): /note="phosphorothioate bond"
  modified_base (2)..(2): 2'-fluoro-nucleotide
  misc_feature (2)..(3): /note="phosphorothioate bond"
  modified_base (3)..(3): 2'-OMe-nucleotide
  modified_base (4)..(4): 2'-fluoro-nucleotide
  modified_base (5)..(5): 2'-OMe-nucleotide
  modified_base (6)..(6): 2'-fluoro-nucleotide
  modified_base (7)..(7): 2'-OMe-nucleotide
  modified_base (8)..(8): 2'-fluoro-nucleotide
  modified_base (9)..(9): 2'-OMe-nucleotide
  modified_base (10)..(10): 2'-fluoro-nucleotide
  modified_base (11)..(11): 2'-OMe-nucleotide
  modified_base (12)..(12): 2'-fluoro-nucleotide
  modified_base (13)..(13): 2'-OMe-nucleotide
  modified_base (14)..(14): 2'-fluoro-nucleotide
  modified_base (15)..(15): 2'-OMe-nucleotide
  modified_base (16)..(16): 2'-fluoro-nucleotide
  modified_base (17)..(17): 2'-OMe-nucleotide
  modified_base (18)..(18): 2'-fluoro-nucleotide
  modified_base (19)..(19): 2'-OMe-nucleotide
  misc_feature (19)..(20): /note="phosphorothioate bond"
  modified_base (20)..(20): dT
  misc_feature (20)..(21): /note="phosphorothioate bond"
  modified_base (21)..(21): dT
gugccuugauaacucuguctt

SEQ ID NO: 1221 - DNA, 21 bp, Artificial Sequence
  source: /note="Description of Artificial Sequence: Synthetic oligonucleotide"
  source: /note="Description of Combined DNA/RNA Molecule: Synthetic oligonucleotide"
  modified_base (1)..(1): 2'-fluoro-nucleotide
  misc_feature (1)..(2): /note="phosphorothioate bond"
  modified_base (2)..(2): 2'-fluoro-nucleotide
  misc_feature (2)..(3): /note="phosphorothioate bond"
  modified_base (3)..(3): 2'-OMe-nucleotide
  modified_base (4)..(4): 2'-fluoro-nucleotide
  modified_base (5)..(5): 2'-OMe-nucleotide
  modified_base (6)..(6): 2'-fluoro-nucleotide
  modified_base (7)..(7): 2'-OMe-nucleotide
  modified_base (8)..(8): 2'-fluoro-nucleotide
  modified_base (9)..(9): 2'-OMe-nucleotide
  modified_base (10)..(10): 2'-fluoro-nucleotide
  modified_base (11)..(11): 2'-OMe-nucleotide
  modified_base (12)..(12): 2'-fluoro-nucleotide
  modified_base (13)..(13): 2'-OMe-nucleotide
  modified_base (14)..(14): 2'-fluoro-nucleotide
  modified_base (15)..(15): 2'-OMe-nucleotide
  modified_base (16)..(16): 2'-fluoro-nucleotide
  modified_base (17)..(17): 2'-OMe-nucleotide
  modified_base (18)..(18): 2'-fluoro-nucleotide
  modified_base (19)..(19): 2'-OMe-nucleotide
  misc_feature (19)..(20): /note="phosphorothioate bond"
  modified_base (20)..(20): dT
  misc_feature (20)..(21): /note="phosphorothioate bond"
  modified_base (21)..(21): dT
guaugugccuugauaacuctt

SEQ ID NO: 1222 - DNA, 21 bp, Artificial Sequence
  source: /note="Description of Artificial Sequence: Synthetic oligonucleotide"
  source: /note="Description of Combined DNA/RNA Molecule: Synthetic oligonucleotide"
  modified_base (1)..(1): 2'-fluoro-nucleotide
  misc_feature (1)..(2): /note="phosphorothioate bond"
  modified_base (2)..(2): 2'-fluoro-nucleotide
  misc_feature (2)..(3): /note="phosphorothioate bond"
  modified_base (3)..(3): 2'-OMe-nucleotide
  modified_base (4)..(4): 2'-fluoro-nucleotide
  modified_base (5)..(5): 2'-OMe-nucleotide
  modified_base (6)..(6): 2'-fluoro-nucleotide
  modified_base (7)..(7): 2'-OMe-nucleotide
  modified_base (8)..(8): 2'-fluoro-nucleotide
  modified_base (9)..(9): 2'-OMe-nucleotide
  modified_base (10)..(10): 2'-fluoro-nucleotide
  modified_base (11)..(11): 2'-OMe-nucleotide
  modified_base (12)..(12): 2'-fluoro-nucleotide
  modified_base (13)..(13): 2'-OMe-nucleotide
  modified_base (14)..(14): 2'-fluoro-nucleotide
  modified_base (15)..(15): 2'-OMe-nucleotide
  modified_base (16)..(16): 2'-fluoro-nucleotide
  modified_base (17)..(17): 2'-OMe-nucleotide
  modified_base (18)..(18): 2'-fluoro-nucleotide
  modified_base (19)..(19): 2'-OMe-nucleotide
  misc_feature (19)..(20): /note="phosphorothioate bond"
  modified_base (20)..(20): dT
  misc_feature (20)..(21): /note="phosphorothioate bond"
  modified_base (21)..(21): dT
aguaugugccuugauaacutt

SEQ ID NO: 1223 - DNA, 21 bp, Artificial Sequence
  source: /note="Description of Artificial Sequence: Synthetic oligonucleotide"
  source: /note="Description of Combined DNA/RNA Molecule: Synthetic oligonucleotide"
  modified_base (1)..(1): 2'-fluoro-nucleotide
  misc_feature (1)..(2): /note="phosphorothioate bond"
  modified_base (2)..(2): 2'-fluoro-nucleotide
  misc_feature (2)..(3): /note="phosphorothioate bond"
  modified_base (3)..(3): 2'-OMe-nucleotide
  modified_base (4)..(4): 2'-fluoro-nucleotide
  modified_base (5)..(5): 2'-OMe-nucleotide
  modified_base (6)..(6): 2'-fluoro-nucleotide
  modified_base (7)..(7): 2'-OMe-nucleotide
  modified_base (8)..(8): 2'-fluoro-nucleotide
  modified_base (9)..(9): 2'-OMe-nucleotide
  modified_base (10)..(10): 2'-fluoro-nucleotide
  modified_base (11)..(11): 2'-OMe-nucleotide
  modified_base (12)..(12): 2'-fluoro-nucleotide
  modified_base (13)..(13): 2'-OMe-nucleotide
  modified_base (14)..(14): 2'-fluoro-nucleotide
  modified_base (15)..(15): 2'-OMe-nucleotide
  modified_base (16)..(16): 2'-fluoro-nucleotide
  modified_base (17)..(17): 2'-OMe-nucleotide
  modified_base (18)..(18): 2'-fluoro-nucleotide
  modified_base (19)..(19): 2'-OMe-nucleotide
  misc_feature (19)..(20): /note="phosphorothioate bond"
  modified_base (20)..(20): dT
  misc_feature (20)..(21): /note="phosphorothioate bond"
  modified_base (21)..(21): dT
ucgauaacuccguccaucatt

SEQ ID NO: 1224 - DNA, 21 bp, Artificial Sequence
  source: /note="Description of Artificial Sequence: Synthetic oligonucleotide"
  source: /note="Description of Combined DNA/RNA Molecule: Synthetic oligonucleotide"
  modified_base (1)..(1): 2'-fluoro-nucleotide
  misc_feature (1)..(2): /note="phosphorothioate bond"
  modified_base (2)..(2): 2'-fluoro-nucleotide
  misc_feature (2)..(3): /note="phosphorothioate bond"
  modified_base (3)..(3): 2'-OMe-nucleotide
  modified_base (4)..(4): 2'-fluoro-nucleotide
  modified_base (5)..(5): 2'-OMe-nucleotide
  modified_base (6)..(6): 2'-fluoro-nucleotide
  modified_base (7)..(7): 2'-OMe-nucleotide
  modified_base (8)..(8): 2'-fluoro-nucleotide
  modified_base (9)..(9): 2'-OMe-nucleotide
  modified_base (10)..(10): 2'-fluoro-nucleotide
  modified_base (11)..(11): 2'-OMe-nucleotide
  modified_base (12)..(12): 2'-fluoro-nucleotide
  modified_base (13)..(13): 2'-OMe-nucleotide
  modified_base (14)..(14): 2'-fluoro-nucleotide
  modified_base (15)..(15): 2'-OMe-nucleotide
  modified_base (16)..(16): 2'-fluoro-nucleotide
  modified_base (17)..(17): 2'-OMe-nucleotide
  modified_base (18)..(18): 2'-fluoro-nucleotide
  modified_base (19)..(19): 2'-OMe-nucleotide
  misc_feature (19)..(20): /note="phosphorothioate bond"
  modified_base (20)..(20): dT
  misc_feature (20)..(21): /note="phosphorothioate bond"
  modified_base (21)..(21): dT
cucgauaacuccguccauctt

SEQ ID NO: 1225 - DNA, 21 bp, Artificial Sequence
  source: /note="Description of Artificial Sequence: Synthetic oligonucleotide"
  source: /note="Description of Combined DNA/RNA Molecule: Synthetic oligonucleotide"
  modified_base (1)..(1): 2'-fluoro-nucleotide
  misc_feature (1)..(2): /note="phosphorothioate bond"
  modified_base (2)..(2): 2'-fluoro-nucleotide
  misc_feature (2)..(3): /note="phosphorothioate bond"
  modified_base (3)..(3): 2'-OMe-nucleotide
  modified_base (4)..(4): 2'-fluoro-nucleotide
  modified_base (5)..(5): 2'-OMe-nucleotide
  modified_base (6)..(6): 2'-fluoro-nucleotide
  modified_base (7)..(7): 2'-OMe-nucleotide
  modified_base (8)..(8): 2'-fluoro-nucleotide
  modified_base (9)..(9): 2'-OMe-nucleotide
  modified_base (10)..(10): 2'-fluoro-nucleotide
  modified_base (11)..(11): 2'-OMe-nucleotide
  modified_base (12)..(12): 2'-fluoro-nucleotide
  modified_base (13)..(13): 2'-OMe-nucleotide
  modified_base (14)..(14): 2'-fluoro-nucleotide
  modified_base (15)..(15): 2'-OMe-nucleotide
  modified_base (16)..(16): 2'-fluoro-nucleotide
  modified_base (17)..(17): 2'-OMe-nucleotide
  modified_base (18)..(18): 2'-fluoro-nucleotide
  modified_base (19)..(19): 2'-OMe-nucleotide
  misc_feature (19)..(20): /note="phosphorothioate bond"
  modified_base (20)..(20): dT
  misc_feature (20)..(21): /note="phosphorothioate bond"
  modified_base (21)..(21): dT
ugccucgauaacuccgucctt

SEQ ID NO: 1226 - DNA, 21 bp, Artificial Sequence
  source: /note="Description of Artificial Sequence: Synthetic oligonucleotide"
  source: /note="Description of Combined DNA/RNA Molecule: Synthetic oligonucleotide"
  modified_base (1)..(1): 2'-fluoro-nucleotide
  misc_feature (1)..(2): /note="phosphorothioate bond"
  modified_base (2)..(2): 2'-fluoro-nucleotide
  misc_feature (2)..(3): /note="phosphorothioate bond"
  modified_base (3)..(3): 2'-OMe-nucleotide
  modified_base (4)..(4): 2'-fluoro-nucleotide
  modified_base (5)..(5): 2'-OMe-nucleotide
  modified_base (6)..(6): 2'-fluoro-nucleotide
  modified_base (7)..(7): 2'-OMe-nucleotide
  modified_base (8)..(8): 2'-fluoro-nucleotide
  modified_base (9)..(9): 2'-OMe-nucleotide
  modified_base (10)..(10): 2'-fluoro-nucleotide
  modified_base (11)..(11): 2'-OMe-nucleotide
  modified_base (12)..(12): 2'-fluoro-nucleotide
  modified_base (13)..(13): 2'-OMe-nucleotide
  modified_base (14)..(14): 2'-fluoro-nucleotide
  modified_base (15)..(15): 2'-OMe-nucleotide
  modified_base (16)..(16): 2'-fluoro-nucleotide
  modified_base (17)..(17): 2'-OMe-nucleotide
  modified_base (18)..(18): 2'-fluoro-nucleotide
  modified_base (19)..(19): 2'-OMe-nucleotide
  misc_feature (19)..(20): /note="phosphorothioate bond"
  modified_base (20)..(20): dT
  misc_feature (20)..(21): /note="phosphorothioate bond"
  modified_base (21)..(21): dT
ugagcauugugucagauugtt

SEQ ID NO: 1227 - DNA, 21 bp, Artificial Sequence
  source: /note="Description of Artificial Sequence: Synthetic oligonucleotide"
  source: /note="Description of Combined DNA/RNA Molecule: Synthetic oligonucleotide"
  modified_base (1)..(1): 2'-fluoro-nucleotide
  misc_feature (1)..(2): /note="phosphorothioate bond"
  modified_base (2)..(2): 2'-fluoro-nucleotide
  misc_feature (2)..(3): /note="phosphorothioate bond"
  modified_base (3)..(3): 2'-OMe-nucleotide
  modified_base (4)..(4): 2'-fluoro-nucleotide
  modified_base (5)..(5): 2'-OMe-nucleotide
  modified_base (6)..(6): 2'-fluoro-nucleotide
  modified_base (7)..(7): 2'-OMe-nucleotide
  modified_base (8)..(8): 2'-fluoro-nucleotide
  modified_base (9)..(9): 2'-OMe-nucleotide
  modified_base (10)..(10): 2'-fluoro-nucleotide
  modified_base (11)..(11): 2'-OMe-nucleotide
  modified_base (12)..(12): 2'-fluoro-nucleotide
  modified_base (13)..(13): 2'-OMe-nucleotide
  modified_base (14)..(14): 2'-fluoro-nucleotide
  modified_base (15)..(15): 2'-OMe-nucleotide
  modified_base (16)..(16): 2'-fluoro-nucleotide
  modified_base (17)..(17): 2'-OMe-nucleotide
  modified_base (18)..(18): 2'-fluoro-nucleotide
  modified_base (19)..(19): 2'-OMe-nucleotide
  misc_feature (19)..(20): /note="phosphorothioate bond"
  modified_base (20)..(20): dT
  misc_feature (20)..(21): /note="phosphorothioate bond"
  modified_base (21)..(21): dT
gccucgauaacucuggccatt

SEQ ID NO: 1228 - DNA, 21 bp, Artificial Sequence
  source: /note="Description of Artificial Sequence: Synthetic oligonucleotide"
  source: /note="Description of Combined DNA/RNA Molecule: Synthetic oligonucleotide"
  modified_base (1)..(1): 2'-fluoro-nucleotide
  misc_feature (1)..(2): /note="phosphorothioate bond"
  modified_base (2)..(2): 2'-fluoro-nucleotide
  misc_feature (2)..(3): /note="phosphorothioate bond"
  modified_base (3)..(3): 2'-OMe-nucleotide
  modified_base (4)..(4): 2'-fluoro-nucleotide
  modified_base (5)..(5): 2'-OMe-nucleotide
  modified_base (6)..(6): 2'-fluoro-nucleotide
  modified_base (7)..(7): 2'-OMe-nucleotide
  modified_base (8)..(8): 2'-fluoro-nucleotide
  modified_base (9)..(9): 2'-OMe-nucleotide
  modified_base (10)..(10): 2'-fluoro-nucleotide
  modified_base (11)..(11): 2'-OMe-nucleotide
  modified_base (12)..(12): 2'-fluoro-nucleotide
  modified_base (13)..(13): 2'-OMe-nucleotide
  modified_base (14)..(14): 2'-fluoro-nucleotide
  modified_base (15)..(15): 2'-OMe-nucleotide
  modified_base (16)..(16): 2'-fluoro-nucleotide
  modified_base (17)..(17): 2'-OMe-nucleotide
  modified_base (18)..(18): 2'-fluoro-nucleotide
  modified_base (19)..(19): 2'-OMe-nucleotide
  misc_feature (19)..(20): /note="phosphorothioate bond"
  modified_base (20)..(20): dT
  misc_feature (20)..(21): /note="phosphorothioate bond"
  modified_base (21)..(21): dT
gugccucgauaacucuggctt

SEQ ID NO: 1229 - DNA, 21 bp, Artificial Sequence
  source: /note="Description of Artificial Sequence: Synthetic oligonucleotide"
  source: /note="Description of Combined DNA/RNA Molecule: Synthetic oligonucleotide"
  modified_base (1)..(1): 2'-fluoro-nucleotide
  misc_feature (1)..(2): /note="phosphorothioate bond"
  modified_base (2)..(2): 2'-fluoro-nucleotide
  misc_feature (2)..(3): /note="phosphorothioate bond"
  modified_base (3)..(3): 2'-OMe-nucleotide
  modified_base (4)..(4): 2'-fluoro-nucleotide
  modified_base (5)..(5): 2'-OMe-nucleotide
  modified_base (6)..(6): 2'-fluoro-nucleotide
  modified_base (7)..(7): 2'-OMe-nucleotide
  modified_base (8)..(8): 2'-fluoro-nucleotide
  modified_base (9)..(9): 2'-OMe-nucleotide
  modified_base (10)..(10): 2'-fluoro-nucleotide
  modified_base (11)..(11): 2'-OMe-nucleotide
  modified_base (12)..(12): 2'-fluoro-nucleotide
  modified_base (13)..(13): 2'-OMe-nucleotide
  modified_base (14)..(14): 2'-fluoro-nucleotide
  modified_base (15)..(15): 2'-OMe-nucleotide
  modified_base (16)..(16): 2'-fluoro-nucleotide
  modified_base (17)..(17): 2'-OMe-nucleotide
  modified_base (18)..(18): 2'-fluoro-nucleotide
  modified_base (19)..(19): 2'-OMe-nucleotide
  misc_feature (19)..(20): /note="phosphorothioate bond"
  modified_base (20)..(20): dT
  misc_feature (20)..(21): /note="phosphorothioate bond"
  modified_base (21)..(21): dT
agcuuauacacaaaaauactt

SEQ ID NO: 1230 - DNA, 21 bp, Artificial Sequence
  source: /note="Description of Artificial Sequence: Synthetic oligonucleotide"
  source: /note="Description of Combined DNA/RNA Molecule: Synthetic oligonucleotide"
  modified_base (1)..(1): 2'-fluoro-nucleotide
  misc_feature (1)..(2): /note="phosphorothioate bond"
  modified_base (2)..(2): 2'-fluoro-nucleotide
  misc_feature (2)..(3): /note="phosphorothioate bond"
  modified_base (3)..(3): 2'-OMe-nucleotide
  modified_base (4)..(4): 2'-fluoro-nucleotide
  modified_base (5)..(5): 2'-OMe-nucleotide
  modified_base (6)..(6): 2'-fluoro-nucleotide
  modified_base (7)..(7): 2'-OMe-nucleotide
  modified_base (8)..(8): 2'-fluoro-nucleotide
  modified_base (9)..(9): 2'-OMe-nucleotide
  modified_base (10)..(10): 2'-fluoro-nucleotide
  modified_base (11)..(11): 2'-OMe-nucleotide
  modified_base (12)..(12): 2'-fluoro-nucleotide
  modified_base (13)..(13): 2'-OMe-nucleotide
  modified_base (14)..(14): 2'-fluoro-nucleotide
  modified_base (15)..(15): 2'-OMe-nucleotide
  modified_base (16)..(16): 2'-fluoro-nucleotide
  modified_base (17)..(17): 2'-OMe-nucleotide
  modified_base (18)..(18): 2'-fluoro-nucleotide
  modified_base (19)..(19): 2'-OMe-nucleotide
  misc_feature (19)..(20): /note="phosphorothioate bond"
  modified_base (20)..(20): dT
  misc_feature (20)..(21): /note="phosphorothioate bond"
  modified_base (21)..(21): dT
caaaucaaaauaagugcagtt

SEQ ID NO: 1231 - DNA, 22 bp, Artificial Sequence
  source: /note="Description of Artificial Sequence: Synthetic oligonucleotide"
  source: /note="Description of Combined DNA/RNA Molecule: Synthetic oligonucleotide"
  modified_base (1)..(1): GalNAc-morpholino-thymidine analog 3
  modified_base (2)..(2): GalNAc-morpholino-thymidine analog 3
  modified_base (3)..(3): GalNAc-morpholino-thymidine analog 3
  modified_base (4)..(4): 2'-OMe-nucleotide
  modified_base (5)..(5): 2'-OMe-nucleotide
  modified_base (6)..(6): 2'-OMe-nucleotide
  modified_base (7)..(7): 2'-OMe-nucleotide
  modified_base (8)..(8): 2'-fluoro-nucleotide
  modified_base (9)..(9): 2'-OMe-nucleotide
  modified_base (10)..(10): 2'-fluoro-nucleotide
  modified_base (11)..(11): 2'-fluoro-nucleotide
  modified_base (12)..(12): 2'-fluoro-nucleotide
  modified_base (13)..(13): 2'-OMe-nucleotide
  modified_base (14)..(14): 2'-OMe-nucleotide
  modified_base (15)..(15): 2'-OMe-nucleotide
  modified_base (16)..(16): 2'-OMe-nucleotide
  modified_base (17)..(17): 2'-OMe-nucleotide
  modified_base (18)..(18): 2'-OMe-nucleotide
  modified_base (19)..(19): 2'-OMe-nucleotide
  modified_base (20)..(20): 2'-OMe-nucleotide
  misc_feature (20)..(21): /note="phosphorothioate bond"
  modified_base (21)..(21): 2'-OMe-nucleotide
  misc_feature (21)..(22): /note="phosphorothioate bond"
  modified_base (22)..(22): 2'-OMe-nucleotide
tttgaguuaucaaggcacauac

SEQ ID NO: 1232 - DNA, 22 bp, Artificial Sequence
  source: /note="Description of Artificial Sequence: Synthetic oligonucleotide"
  source: /note="Description of Combined DNA/RNA Molecule: Synthetic oligonucleotide"
  modified_base (1)..(1): GalNAc-morpholino-thymidine analog 3
  modified_base (2)..(2): GalNAc-morpholino-thymidine analog 3
  modified_base (3)..(3): GalNAc-morpholino-thymidine analog 3
  modified_base (4)..(4): 2'-OMe-nucleotide
  modified_base (5)..(5): 2'-OMe-nucleotide
  modified_base (6)..(6): 2'-OMe-nucleotide
  modified_base (7)..(7): 2'-OMe-nucleotide
  modified_base (8)..(8): 2'-fluoro-nucleotide
  modified_base (9)..(9): 2'-OMe-nucleotide
  modified_base (10)..(10): 2'-fluoro-nucleotide
  modified_base (11)..(11): 2'-fluoro-nucleotide
  modified_base (12)..(12): 2'-fluoro-nucleotide
  modified_base (13)..(13): 2'-OMe-nucleotide
  modified_base (14)..(14): 2'-OMe-nucleotide
  modified_base (15)..(15): 2'-OMe-nucleotide
  modified_base (16)..(16): 2'-OMe-nucleotide
  modified_base (17)..(17): 2'-OMe-nucleotide
  modified_base (18)..(18): 2'-OMe-nucleotide
  modified_base (19)..(19): 2'-OMe-nucleotide
  modified_base (20)..(20): 2'-OMe-nucleotide
  misc_feature (20)..(21): /note="phosphorothioate bond"
  modified_base (21)..(21): 2'-OMe-nucleotide
  misc_feature (21)..(22): /note="phosphorothioate bond"
  modified_base (22)..(22): 2'-OMe-nucleotide
tttgaguuaucaaggcacauac

SEQ ID NO: 1233 - DNA, 22 bp, Artificial Sequence
  source: /note="Description of Artificial Sequence: Synthetic oligonucleotide"
  source: /note="Description of Combined DNA/RNA Molecule: Synthetic oligonucleotide"
  modified_base (1)..(1): GalNAc-morpholino-thymidine analog 3
  modified_base (2)..(2): GalNAc-morpholino-thymidine analog 3
  modified_base (3)..(3): GalNAc-morpholino-thymidine analog 3
  modified_base (4)..(4): 2'-OMe-nucleotide
  modified_base (5)..(5): 2'-OMe-nucleotide
  modified_base (6)..(6): 2'-OMe-nucleotide
  modified_base (7)..(7): 2'-OMe-nucleotide
  modified_base (8)..(8): 2'-fluoro-nucleotide
  modified_base (9)..(9): 2'-OMe-nucleotide
  modified_base (10)..(10): 2'-fluoro-nucleotide
  modified_base (11)..(11): 2'-fluoro-nucleotide
  modified_base (12)..(12): 2'-fluoro-nucleotide
  modified_base (13)..(13): 2'-OMe-nucleotide
  modified_base (14)..(14): 2'-OMe-nucleotide
  modified_base (15)..(15): 2'-OMe-nucleotide
  modified_base (16)..(16): 2'-OMe-nucleotide
  modified_base (17)..(17): 2'-OMe-nucleotide
  modified_base (18)..(18): 2'-OMe-nucleotide
  modified_base (19)..(19): 2'-OMe-nucleotide
  modified_base (20)..(20): 2'-OMe-nucleotide
  misc_feature (20)..(21): /note="phosphorothioate bond"
  modified_base (21)..(21): 2'-OMe-nucleotide
  misc_feature (21)..(22): /note="phosphorothioate bond"
  modified_base (22)..(22): 2'-OMe-nucleotide
tttgaguuaucaaggcacauac

SEQ ID NO: 1234 - DNA, 22 bp, Artificial Sequence
  source: /note="Description of Artificial Sequence: Synthetic oligonucleotide"
  source: /note="Description of Combined DNA/RNA Molecule: Synthetic oligonucleotide"
  modified_base (1)..(1): GalNAc-morpholino-thymidine analog 3
  modified_base (2)..(2): GalNAc-morpholino-thymidine analog 3
  modified_base (3)..(3): GalNAc-morpholino-thymidine analog 3
  modified_base (4)..(4): 2'-OMe-nucleotide
  modified_base (5)..(5): 2'-OMe-nucleotide
  modified_base (6)..(6): 2'-OMe-nucleotide
  modified_base (7)..(7): 2'-OMe-nucleotide
  modified_base (8)..(8): 2'-fluoro-nucleotide
  modified_base (9)..(9): 2'-OMe-nucleotide
  modified_base (10)..(10): 2'-fluoro-nucleotide
  modified_base (11)..(11): 2'-fluoro-nucleotide
  modified_base (12)..(12): 2'-fluoro-nucleotide
  modified_base (13)..(13): 2'-OMe-nucleotide
  modified_base (14)..(14): 2'-OMe-nucleotide
  modified_base (15)..(15): 2'-OMe-nucleotide
  modified_base (16)..(16): 2'-OMe-nucleotide
  modified_base (17)..(17): 2'-OMe-nucleotide
  modified_base (18)..(18): 2'-OMe-nucleotide
  modified_base (19)..(19): 2'-OMe-nucleotide
  modified_base (20)..(20): 2'-OMe-nucleotide
  misc_feature (20)..(21): /note="phosphorothioate bond"
  modified_base (21)..(21): 2'-OMe-nucleotide
  misc_feature (21)..(22): /note="phosphorothioate bond"
  modified_base (22)..(22): 2'-OMe-nucleotide
tttgaguuaucaaggcacauac

SEQ ID NO: 1235 - DNA, 22 bp, Artificial Sequence
  source: /note="Description of Artificial Sequence: Synthetic oligonucleotide"
  source: /note="Description of Combined DNA/RNA Molecule: Synthetic oligonucleotide"
  modified_base (1)..(1): GalNAc-morpholino-thymidine analog 3
  modified_base (2)..(2): GalNAc-morpholino-thymidine analog 3
  modified_base (3)..(3): GalNAc-morpholino-thymidine analog 3
  modified_base (4)..(4): 2'-OMe-nucleotide
  modified_base (5)..(5): 2'-OMe-nucleotide
  modified_base (6)..(6): 2'-OMe-nucleotide
  modified_base (7)..(7): 2'-OMe-nucleotide
  modified_base (8)..(8): 2'-fluoro-nucleotide
  modified_base (9)..(9): 2'-OMe-nucleotide
  modified_base (10)..(10): 2'-fluoro-nucleotide
  modified_base (11)..(11): 2'-fluoro-nucleotide
  modified_base (12)..(12): 2'-fluoro-nucleotide
  modified_base (13)..(13): 2'-OMe-nucleotide
  modified_base (14)..(14): 2'-OMe-nucleotide
  modified_base (15)..(15): 2'-OMe-nucleotide
  modified_base (16)..(16): 2'-OMe-nucleotide
  modified_base (17)..(17): 2'-OMe-nucleotide
  modified_base (18)..(18): 2'-OMe-nucleotide
  modified_base (19)..(19): 2'-OMe-nucleotide
  modified_base (20)..(20): 2'-OMe-nucleotide
  misc_feature (20)..(21): /note="phosphorothioate bond"
  modified_base (21)..(21): 2'-OMe-nucleotide
  misc_feature (21)..(22): /note="phosphorothioate bond"
  modified_base (22)..(22): 2'-OMe-nucleotide
tttgaguuaucaaggcacauac

SEQ ID NO: 1236 - DNA, 22 bp, Artificial Sequence
  source: /note="Description of Artificial Sequence: Synthetic oligonucleotide"
  source: /note="Description of Combined DNA/RNA Molecule: Synthetic oligonucleotide"
  modified_base (1)..(1): GalNAc-morpholino-thymidine analog 3
  modified_base (2)..(2): GalNAc-morpholino-thymidine analog 3
  modified_base (3)..(3): GalNAc-morpholino-thymidine analog 3
  modified_base (4)..(4): Locked nucleic acid (LNA) nucleotide
  modified_base (5)..(5): Locked nucleic acid (LNA) nucleotide
  modified_base (6)..(6): 2'-OMe-nucleotide
  modified_base (7)..(7): 2'-OMe-nucleotide
  modified_base (8)..(8): 2'-fluoro-nucleotide
  modified_base (9)..(9): 2'-OMe-nucleotide
  modified_base (10)..(10): 2'-fluoro-nucleotide
  modified_base (11)..(11): 2'-fluoro-nucleotide
  modified_base (12)..(12): 2'-fluoro-nucleotide
  modified_base (13)..(13): 2'-OMe-nucleotide
  modified_base (14)..(14): 2'-OMe-nucleotide
  modified_base (15)..(15): 2'-OMe-nucleotide
  modified_base (16)..(16): 2'-OMe-nucleotide
  modified_base (17)..(17): 2'-OMe-nucleotide
  modified_base (18)..(18): 2'-OMe-nucleotide
  modified_base (19)..(19): 2'-OMe-nucleotide
  modified_base (20)..(20): 2'-OMe-nucleotide
  misc_feature (20)..(21): /note="phosphorothioate bond"
  modified_base (21)..(21): 2'-OMe-nucleotide
  misc_feature (21)..(22): /note="phosphorothioate bond"
  modified_base (22)..(22): 2'-OMe-nucleotide
tttgaguuaucaaggcacauac

SEQ ID NO: 1237 - DNA, 22 bp, Artificial Sequence
  source: /note="Description of Artificial Sequence: Synthetic oligonucleotide"
  source: /note="Description of Combined DNA/RNA Molecule: Synthetic oligonucleotide"
  modified_base (1)..(1): GalNAc-morpholino-thymidine analog 3
  modified_base (2)..(2): GalNAc-morpholino-thymidine analog 3
  modified_base (3)..(3): GalNAc-morpholino-thymidine analog 3
  modified_base (4)..(4): Locked nucleic acid (LNA) nucleotide
  modified_base (5)..(5): Locked nucleic acid (LNA) nucleotide
  modified_base (6)..(6): 2'-OMe-nucleotide
  modified_base (7)..(7): 2'-OMe-nucleotide
  modified_base (8)..(8): 2'-fluoro-nucleotide
  modified_base (9)..(9): 2'-OMe-nucleotide
  modified_base (10)..(10): 2'-fluoro-nucleotide
  modified_base (11)..(11): 2'-fluoro-nucleotide
  modified_base (12)..(12): 2'-fluoro-nucleotide
  modified_base (13)..(13): 2'-OMe-nucleotide
  modified_base (14)..(14): 2'-OMe-nucleotide
  modified_base (15)..(15): 2'-OMe-nucleotide
  modified_base (16)..(16): 2'-OMe-nucleotide
  modified_base (17)..(17): 2'-OMe-nucleotide
  modified_base (18)..(18): 2'-OMe-nucleotide
  modified_base (19)..(19): 2'-OMe-nucleotide
  modified_base (20)..(20): 2'-OMe-nucleotide
  misc_feature (20)..(21): /note="phosphorothioate bond"
  modified_base (21)..(21): 2'-OMe-nucleotide
  misc_feature (21)..(22): /note="phosphorothioate bond"
  modified_base (22)..(22): 2'-OMe-nucleotide
tttgaguuaucaaggcacauac

SEQ ID NO: 1238 - DNA, 22 bp, Artificial Sequence
  source: /note="Description of Artificial Sequence: Synthetic oligonucleotide"
  source: /note="Description of Combined DNA/RNA Molecule: Synthetic oligonucleotide"
  modified_base (1)..(1): GalNAc-morpholino-thymidine analog 3
  modified_base (2)..(2): GalNAc-morpholino-thymidine analog 3
  modified_base (3)..(3): GalNAc-morpholino-thymidine analog 3
  modified_base (4)..(4): Locked nucleic acid (LNA) nucleotide
  modified_base (5)..(5): Locked nucleic acid (LNA) nucleotide
  modified_base (6)..(6): 2'-OMe-nucleotide
  modified_base (7)..(7): 2'-OMe-nucleotide
  modified_base (8)..(8): 2'-fluoro-nucleotide
  modified_base (9)..(9): 2'-OMe-nucleotide
  modified_base (10)..(10): 2'-fluoro-nucleotide
  modified_base (11)..(11): 2'-fluoro-nucleotide
  modified_base (12)..(12): 2'-fluoro-nucleotide
  modified_base (13)..(13): 2'-OMe-nucleotide
  modified_base (14)..(14): 2'-OMe-nucleotide
  modified_base (15)..(15): 2'-OMe-nucleotide
  modified_base (16)..(16): 2'-OMe-nucleotide
  modified_base (17)..(17): 2'-OMe-nucleotide
  modified_base (18)..(18): 2'-OMe-nucleotide
  modified_base (19)..(19): 2'-OMe-nucleotide
  modified_base (20)..(20): 2'-OMe-nucleotide
  misc_feature (20)..(21): /note="phosphorothioate bond"
  modified_base (21)..(21): 2'-OMe-nucleotide
  misc_feature (21)..(22): /note="phosphorothioate bond"
  modified_base (22)..(22): 2'-OMe-nucleotide
tttgaguuaucaaggcacauac

SEQ ID NO: 1239 - DNA, 22 bp, Artificial Sequence
  source: /note="Description of Artificial Sequence: Synthetic oligonucleotide"
  source: /note="Description of Combined DNA/RNA Molecule: Synthetic oligonucleotide"
  modified_base (1)..(1): GalNAc-morpholino-thymidine analog 3
  modified_base (2)..(2): GalNAc-morpholino-thymidine analog 3
  modified_base (3)..(3): GalNAc-morpholino-thymidine analog 3
  modified_base (4)..(4): Locked nucleic acid (LNA) nucleotide
  modified_base (5)..(5): Locked nucleic acid (LNA) nucleotide
  modified_base (6)..(6): 2'-OMe-nucleotide
  modified_base (7)..(7): 2'-OMe-nucleotide
  modified_base (8)..(8): 2'-fluoro-nucleotide
  modified_base (9)..(9): 2'-OMe-nucleotide
  modified_base (10)..(10): 2'-fluoro-nucleotide
  modified_base (11)..(11): 2'-fluoro-nucleotide
  modified_base (12)..(12): 2'-fluoro-nucleotide
  modified_base (13)..(13): 2'-OMe-nucleotide
  modified_base (14)..(14): 2'-OMe-nucleotide
  modified_base (15)..(15): 2'-OMe-nucleotide
  modified_base (16)..(16): 2'-OMe-nucleotide
  modified_base (17)..(17): 2'-OMe-nucleotide
  modified_base (18)..(18): 2'-OMe-nucleotide
  modified_base (19)..(19): 2'-OMe-nucleotide
  modified_base (20)..(20): 2'-OMe-nucleotide
  misc_feature (20)..(21): /note="phosphorothioate bond"
  modified_base (21)..(21): 2'-OMe-nucleotide
  misc_feature (21)..(22): /note="phosphorothioate bond"
  modified_base (22)..(22): 2'-OMe-nucleotide
tttgaguuaucaaggcacauac

SEQ ID NO: 1240 - DNA, 22 bp, Artificial Sequence
  source: /note="Description of Artificial Sequence: Synthetic oligonucleotide"
  source: /note="Description of Combined DNA/RNA Molecule: Synthetic oligonucleotide"
  modified_base (1)..(1): GalNAc-morpholino-thymidine analog 3
  modified_base (2)..(2): GalNAc-morpholino-thymidine analog 3
  modified_base (3)..(3): GalNAc-morpholino-thymidine analog 3
  modified_base (4)..(4): Locked nucleic acid (LNA) nucleotide
  modified_base (5)..(5): Locked nucleic acid (LNA) nucleotide
  modified_base (6)..(6): 2'-OMe-nucleotide
  modified_base (7)..(7): 2'-OMe-nucleotide
  modified_base (8)..(8): 2'-fluoro-nucleotide
  modified_base (9)..(9): 2'-OMe-nucleotide
  modified_base (10)..(10): 2'-fluoro-nucleotide
  modified_base (11)..(11): 2'-fluoro-nucleotide
  modified_base (12)..(12): 2'-fluoro-nucleotide
  modified_base (13)..(13): 2'-OMe-nucleotide
  modified_base (14)..(14): 2'-OMe-nucleotide
  modified_base (15)..(15): 2'-OMe-nucleotide
  modified_base (16)..(16): 2'-OMe-nucleotide
  modified_base (17)..(17): 2'-OMe-nucleotide
  modified_base (18)..(18): 2'-OMe-nucleotide
  modified_base (19)..(19): 2'-OMe-nucleotide
  modified_base (20)..(20): 2'-OMe-nucleotide
  misc_feature (20)..(21): /note="phosphorothioate bond"
  modified_base (21)..(21): 2'-OMe-nucleotide
  misc_feature (21)..(22): /note="phosphorothioate bond"
  modified_base (22)..(22): 2'-OMe-nucleotide
tttgaguuaucaaggcacauac

SEQ ID NO: 1241 - DNA, 22 bp, Artificial Sequence
  source: /note="Description of Artificial Sequence: Synthetic oligonucleotide"
  source: /note="Description of Combined DNA/RNA Molecule: Synthetic oligonucleotide"
  modified_base (1)..(1): GalNAc-morpholino-thymidine analog 3
  modified_base (2)..(2): GalNAc-morpholino-thymidine analog 3
  modified_base (3)..(3): GalNAc-morpholino-thymidine analog 3
  modified_base (4)..(4): 2'-OMe-nucleotide
  modified_base (5)..(5): 2'-OMe-nucleotide
  modified_base (6)..(6): 2'-OMe-nucleotide
  modified_base (7)..(7): 2'-OMe-nucleotide
  modified_base (8)..(8): 2'-fluoro-nucleotide
  modified_base (9)..(9): 2'-OMe-nucleotide
  modified_base (10)..(10): 2'-fluoro-nucleotide
  modified_base (11)..(11): 2'-fluoro-nucleotide
  modified_base (12)..(12): 2'-fluoro-nucleotide
  modified_base (13)..(13): 2'-OMe-nucleotide
  modified_base (14)..(14): 2'-OMe-nucleotide
  modified_base (15)..(15): 2'-OMe-nucleotide
  modified_base (16)..(16): 2'-OMe-nucleotide
  modified_base (17)..(17): 2'-OMe-nucleotide
  modified_base (18)..(18): 2'-OMe-nucleotide
  modified_base (19)..(19): 2'-OMe-nucleotide
  modified_base (20)..(20): 2'-OMe-nucleotide
  modified_base (21)..(21): Locked nucleic acid (LNA) nucleotide
  modified_base (22)..(22): Locked nucleic acid (LNA) nucleotide
tttgaguuaucaaggcacautt

SEQ ID NO: 1242 - DNA, 22 bp, Artificial Sequence
  source: /note="Description of Artificial Sequence: Synthetic oligonucleotide"
  source: /note="Description of Combined DNA/RNA Molecule: Synthetic oligonucleotide"
  modified_base (1)..(1): GalNAc-morpholino-thymidine analog 3
  modified_base (2)..(2): GalNAc-morpholino-thymidine analog 3
  modified_base (3)..(3): GalNAc-morpholino-thymidine analog 3
  modified_base (4)..(4): 2'-OMe-nucleotide
  modified_base (5)..(5): 2'-OMe-nucleotide
  modified_base (6)..(6): 2'-OMe-nucleotide
  modified_base (7)..(7): 2'-OMe-nucleotide
  modified_base (8)..(8): 2'-fluoro-nucleotide
  modified_base (9)..(9): 2'-OMe-nucleotide
  modified_base (10)..(10): 2'-fluoro-nucleotide
  modified_base (11)..(11): 2'-fluoro-nucleotide
  modified_base (12)..(12): 2'-fluoro-nucleotide
  modified_base (13)..(13): 2'-OMe-nucleotide
  modified_base (14)..(14): 2'-OMe-nucleotide
  modified_base (15)..(15): 2'-OMe-nucleotide
  modified_base (16)..(16): 2'-OMe-nucleotide
  modified_base (17)..(17): 2'-OMe-nucleotide
  modified_base (18)..(18): 2'-OMe-nucleotide
  modified_base (19)..(19): 2'-OMe-nucleotide
  modified_base (20)..(20): 2'-OMe-nucleotide
  modified_base (21)..(21): Locked nucleic acid (LNA) nucleotide
  modified_base (22)..(22): Locked nucleic acid (LNA) nucleotide
tttgaguuaucaaggcacautt

SEQ ID NO: 1243 - DNA, 22 bp, Artificial Sequence
  source: /note="Description of Artificial Sequence: Synthetic oligonucleotide"
  source: /note="Description of Combined DNA/RNA Molecule: Synthetic oligonucleotide"
  modified_base (1)..(1): GalNAc-morpholino-thymidine analog 3
  modified_base (2)..(2): GalNAc-morpholino-thymidine analog 3
  modified_base (3)..(3): GalNAc-morpholino-thymidine analog 3
  modified_base (4)..(4): 2'-OMe-nucleotide
  modified_base (5)..(5): 2'-OMe-nucleotide
  modified_base (6)..(6): 2'-OMe-nucleotide
  modified_base (7)..(7): 2'-OMe-nucleotide
  modified_base (8)..(8): 2'-fluoro-nucleotide
  modified_base (9)..(9): 2'-OMe-nucleotide
  modified_base (10)..(10): 2'-fluoro-nucleotide
  modified_base (11)..(11): 2'-fluoro-nucleotide
  modified_base (12)..(12): 2'-fluoro-nucleotide
  modified_base (13)..(13): 2'-OMe-nucleotide
  modified_base (14)..(14): 2'-OMe-nucleotide
  modified_base (15)..(15): 2'-OMe-nucleotide
  modified_base (16)..(16): 2'-OMe-nucleotide
  modified_base (17)..(17): 2'-OMe-nucleotide
  modified_base (18)..(18): 2'-OMe-nucleotide
  modified_base (19)..(19): 2'-OMe-nucleotide
  modified_base (20)..(20): 2'-OMe-nucleotide
  modified_base (21)..(21): Locked nucleic acid (LNA) nucleotide
  modified_base (22)..(22): Locked nucleic acid (LNA) nucleotide
tttgaguuaucaaggcacautt

SEQ ID NO: 1244 - DNA, 22 bp, Artificial Sequence
  source: /note="Description of Artificial Sequence: Synthetic oligonucleotide"
  source: /note="Description of Combined DNA/RNA Molecule: Synthetic oligonucleotide"
  modified_base (1)..(1): GalNAc-morpholino-thymidine analog 3
  modified_base (2)..(2): GalNAc-morpholino-thymidine analog 3
  modified_base (3)..(3): GalNAc-morpholino-thymidine analog 3
  modified_base (4)..(4): 2'-OMe-nucleotide
  modified_base (5)..(5): 2'-OMe-nucleotide
  modified_base (6)..(6): 2'-OMe-nucleotide
  modified_base (7)..(7): 2'-OMe-nucleotide
  modified_base (8)..(8): 2'-fluoro-nucleotide
  modified_base (9)..(9): 2'-OMe-nucleotide
  modified_base (10)..(10): 2'-fluoro-nucleotide
  modified_base (11)..(11): 2'-fluoro-nucleotide
  modified_base (12)..(12): 2'-fluoro-nucleotide
  modified_base (13)..(13): 2'-OMe-nucleotide
  modified_base (14)..(14): 2'-OMe-nucleotide
  modified_base (15)..(15): 2'-OMe-nucleotide
  modified_base (16)..(16): 2'-OMe-nucleotide
  modified_base (17)..(17): 2'-OMe-nucleotide
  modified_base (18)..(18): 2'-OMe-nucleotide
  modified_base (19)..(19): 2'-OMe-nucleotide
  modified_base (20)..(20): 2'-OMe-nucleotide
  modified_base (21)..(21): Locked nucleic acid (LNA) nucleotide
  modified_base (22)..(22): Locked nucleic acid (LNA) nucleotide
tttgaguuaucaaggcacautt

SEQ ID NO: 1245 - DNA, 22 bp, Artificial Sequence
  source: /note="Description of Artificial Sequence: Synthetic oligonucleotide"
  source: /note="Description of Combined DNA/RNA Molecule: Synthetic oligonucleotide"
  modified_base (1)..(1): GalNAc-morpholino-thymidine analog 3
  modified_base (2)..(2): GalNAc-morpholino-thymidine analog 3
  modified_base (3)..(3): GalNAc-morpholino-thymidine analog 3
  modified_base (4)..(4): 2'-OMe-nucleotide
  modified_base (5)..(5): 2'-OMe-nucleotide
  modified_base (6)..(6): 2'-OMe-nucleotide
  modified_base (7)..(7): 2'-OMe-nucleotide
  modified_base (8)..(8): 2'-fluoro-nucleotide
  modified_base (9)..(9): 2'-OMe-nucleotide
  modified_base (10)..(10): 2'-fluoro-nucleotide
  modified_base (11)..(11): 2'-fluoro-nucleotide
  modified_base (12)..(12): 2'-fluoro-nucleotide
  modified_base (13)..(13): 2'-OMe-nucleotide
  modified_base (14)..(14): 2'-OMe-nucleotide
  modified_base (15)..(15): 2'-OMe-nucleotide
  modified_base (16)..(16): 2'-OMe-nucleotide
  modified_base (17)..(17): 2'-OMe-nucleotide
  modified_base (18)..(18): 2'-OMe-nucleotide
  modified_base (19)..(19): 2'-OMe-nucleotide
  modified_base (20)..(20): 2'-OMe-nucleotide
  modified_base (21)..(21): Locked nucleic acid (LNA) nucleotide
  modified_base (22)..(22): Locked nucleic acid (LNA) nucleotide
tttgaguuaucaaggcacautt

SEQ ID NO: 1246 - DNA, 22 bp, Artificial Sequence
  source: /note="Description of Artificial Sequence: Synthetic oligonucleotide"
  source: /note="Description of Combined DNA/RNA Molecule: Synthetic oligonucleotide"
  modified_base (1)..(1): GalNAc-morpholino-thymidine analog 3
  modified_base (2)..(2): GalNAc-morpholino-thymidine analog 3
  modified_base (3)..(3): GalNAc-morpholino-thymidine analog 3
  modified_base (4)..(4): 2'-OMe-nucleotide
  modified_base (5)..(5): 2'-OMe-nucleotide
  modified_base (6)..(6): 2'-OMe-nucleotide
  modified_base (7)..(7): 2'-OMe-nucleotide
  modified_base (8)..(8): 2'-fluoro-nucleotide
  modified_base (9)..(9): 2'-OMe-nucleotide
  modified_base (10)..(10): 2'-fluoro-nucleotide
  modified_base (11)..(11): 2'-fluoro-nucleotide
  modified_base (12)..(12): 2'-fluoro-nucleotide
  modified_base (13)..(13): 2'-OMe-nucleotide
  modified_base (14)..(14): 2'-OMe-nucleotide
  modified_base (15)..(15): 2'-OMe-nucleotide
  modified_base (16)..(16): 2'-OMe-nucleotide
  modified_base (17)..(17): 2'-OMe-nucleotide
  modified_base (18)..(18): 2'-OMe-nucleotide
  modified_base (19)..(19): 2'-OMe-nucleotide
  modified_base (20)..(20): 2'-OMe-nucleotide
  modified_base (21)..(21): Locked nucleic acid (LNA) nucleotide
  modified_base (22)..(22): Locked nucleic acid (LNA) nucleotide
tttgaguuaucaaggcacautt

SEQ ID NO: 1247 - DNA, 22 bp, Artificial Sequence
  source: /note="Description of Artificial Sequence: Synthetic oligonucleotide"
  source: /note="Description of Combined DNA/RNA Molecule: Synthetic oligonucleotide"
  modified_base (1)..(1): GalNAc-morpholino-thymidine analog 3
  modified_base (2)..(2): GalNAc-morpholino-thymidine analog 3
  modified_base (3)..(3): GalNAc-morpholino-thymidine analog 3
  modified_base (4)..(4): 2'-OMe-nucleotide
  modified_base (5)..(5): 2'-OMe-nucleotide
  modified_base (6)..(6): 2'-OMe-nucleotide
  modified_base (7)..(7): 2'-OMe-nucleotide
  modified_base (8)..(8): 2'-fluoro-nucleotide
  modified_base (9)..(9): 2'-OMe-nucleotide
  modified_base (10)..(10): 2'-fluoro-nucleotide
  modified_base (11)..(11): 2'-fluoro-nucleotide
  modified_base (12)..(12): 2'-fluoro-nucleotide
  modified_base (13)..(13): 2'-OMe-nucleotide
  modified_base (14)..(14): 2'-OMe-nucleotide
  modified_base (15)..(15): 2'-OMe-nucleotide
  modified_base (16)..(16): 2'-OMe-nucleotide
  modified_base (17)..(17): 2'-OMe-nucleotide
  modified_base (18)..(18): 2'-OMe-nucleotide
  modified_base (19)..(19): 2'-OMe-nucleotide
  modified_base (20)..(20): 2'-OMe-nucleotide
  modified_base (21)..(21): Locked nucleic acid (LNA) nucleotide
  modified_base (22)..(22): Locked nucleic acid (LNA) nucleotide
tttgaguuaucaaggcacautt

SEQ ID NO: 1248 - DNA, 22 bp, Artificial Sequence
  source: /note="Description of Artificial Sequence: Synthetic oligonucleotide"
  source: /note="Description of Combined DNA/RNA Molecule: Synthetic oligonucleotide"
  modified_base (1)..(1): GalNAc-morpholino-thymidine analog 3
  modified_base (2)..(2): GalNAc-morpholino-thymidine analog 3
  modified_base (3)..(3): GalNAc-morpholino-thymidine analog 3
  modified_base (4)..(4): 2'-OMe-nucleotide
  modified_base (5)..(5): 2'-OMe-nucleotide
  modified_base (6)..(6): 2'-OMe-nucleotide
  modified_base (7)..(7): 2'-OMe-nucleotide
  modified_base (8)..(8): 2'-fluoro-nucleotide
  modified_base (9)..(9): 2'-OMe-nucleotide
  modified_base (10)..(10): 2'-fluoro-nucleotide
  modified_base (11)..(11): 2'-fluoro-nucleotide
  modified_base (12)..(12): 2'-fluoro-nucleotide
  modified_base (13)..(13): 2'-OMe-nucleotide
  modified_base (14)..(14): 2'-OMe-nucleotide
  modified_base (15)..(15): 2'-OMe-nucleotide
  modified_base (16)..(16): 2'-OMe-nucleotide
  modified_base (17)..(17): 2'-OMe-nucleotide
  modified_base (18)..(18): 2'-OMe-nucleotide
  modified_base (19)..(19): 2'-OMe-nucleotide
  modified_base (20)..(20): 2'-OMe-nucleotide
  modified_base (21)..(21): Locked nucleic acid (LNA) nucleotide
  modified_base (22)..(22): Locked nucleic acid (LNA) nucleotide
tttgaguuaucaaggcacautt

SEQ ID NO: 1249 - DNA, 22 bp, Artificial Sequence
  source: /note="Description of Artificial Sequence: Synthetic oligonucleotide"
  source: /note="Description of Combined DNA/RNA Molecule: Synthetic oligonucleotide"
  modified_base (1)..(1): GalNAc-morpholino-thymidine analog 3
  modified_base (2)..(2): GalNAc-morpholino-thymidine analog 3
  modified_base (3)..(3): GalNAc-morpholino-thymidine analog 3
  modified_base (4)..(4): 2'-OMe-nucleotide
  modified_base (5)..(5): 2'-OMe-nucleotide
  modified_base (6)..(6): 2'-OMe-nucleotide
  modified_base (7)..(7): 2'-OMe-nucleotide
  modified_base (8)..(8): 2'-fluoro-nucleotide
  modified_base (9)..(9): 2'-OMe-nucleotide
  modified_base (10)..(10): 2'-fluoro-nucleotide
  modified_base (11)..(11): 2'-fluoro-nucleotide
  modified_base (12)..(12): 2'-fluoro-nucleotide
  modified_base (13)..(13): 2'-OMe-nucleotide
  modified_base (14)..(14): 2'-OMe-nucleotide
  modified_base (15)..(15): 2'-OMe-nucleotide
  modified_base (16)..(16): 2'-OMe-nucleotide
  modified_base (17)..(17): 2'-OMe-nucleotide
  modified_base (18)..(18): 2'-OMe-nucleotide
  modified_base (19)..(19): 2'-OMe-nucleotide
  modified_base (20)..(20): 2'-OMe-nucleotide
  modified_base (21)..(21): Locked nucleic acid (LNA) nucleotide
  modified_base (22)..(22): Locked nucleic acid (LNA) nucleotide
tttgaguuaucaaggcacautt

SEQ ID NO: 1250 - DNA, 22 bp, Artificial Sequence
  source: /note="Description of Artificial Sequence: Synthetic oligonucleotide"
  source: /note="Description of Combined DNA/RNA Molecule: Synthetic oligonucleotide"
  modified_base (1)..(1): GalNAc-morpholino-thymidine analog 3
  misc_feature (1)..(2): /note="phosphorothioate bond"
  modified_base (2)..(2): GalNAc-morpholino-thymidine analog 3
  misc_feature (2)..(3): /note="phosphorothioate bond"
  modified_base (3)..(3): GalNAc-morpholino-thymidine analog 3
  modified_base (4)..(4): 2'-OMe-nucleotide
  modified_base (5)..(5): 2'-OMe-nucleotide
  modified_base (6)..(6): 2'-OMe-nucleotide
  modified_base (7)..(7): 2'-OMe-nucleotide
  modified_base (8)..(8): 2'-fluoro-nucleotide
  modified_base (9)..(9): 2'-OMe-nucleotide
  modified_base (10)..(10): 2'-fluoro-nucleotide
  modified_base (11)..(11): 2'-fluoro-nucleotide
  modified_base (12)..(12): 2'-fluoro-nucleotide
  modified_base (13)..(13): 2'-OMe-nucleotide
  modified_base (14)..(14): 2'-OMe-nucleotide
  modified_base (15)..(15): 2'-OMe-nucleotide
  modified_base (16)..(16): 2'-OMe-nucleotide
  modified_base (17)..(17): 2'-OMe-nucleotide
  modified_base (18)..(18): 2'-OMe-nucleotide
  modified_base (19)..(19): 2'-OMe-nucleotide
  modified_base (20)..(20): 2'-OMe-nucleotide
  misc_feature (20)..(21): /note="phosphorothioate bond"
  modified_base (21)..(21): Locked nucleic acid (LNA) nucleotide
  misc_feature (21)..(22): /note="phosphorothioate bond"
  modified_base (22)..(22): Locked nucleic acid (LNA) nucleotide
tttgaguuaucaaggcacautt

SEQ ID NO: 1251 - DNA, 22 bp, Artificial Sequence
  source: /note="Description of Artificial Sequence: Synthetic oligonucleotide"
  source: /note="Description of Combined DNA/RNA Molecule: Synthetic oligonucleotide"
  modified_base (1)..(1): GalNAc-morpholino-thymidine analog 3
  misc_feature (1)..(2): /note="phosphorothioate bond"
  modified_base (2)..(2): GalNAc-morpholino-thymidine analog 3
  misc_feature (2)..(3): /note="phosphorothioate bond"
  modified_base (3)..(3): GalNAc-morpholino-thymidine analog 3
  modified_base (4)..(4): 2'-OMe-nucleotide
  modified_base (5)..(5): 2'-OMe-nucleotide
  modified_base (6)..(6): 2'-OMe-nucleotide
  modified_base (7)..(7): 2'-OMe-nucleotide
  modified_base (8)..(8): 2'-fluoro-nucleotide
  modified_base (9)..(9): 2'-OMe-nucleotide
  modified_base (10)..(10): 2'-fluoro-nucleotide
  modified_base (11)..(11): 2'-fluoro-nucleotide
  modified_base (12)..(12): 2'-fluoro-nucleotide
  modified_base (13)..(13): 2'-OMe-nucleotide
  modified_base (14)..(14): 2'-OMe-nucleotide
  modified_base (15)..(15): 2'-OMe-nucleotide
  modified_base (16)..(16): 2'-OMe-nucleotide
  modified_base (17)..(17): 2'-OMe-nucleotide
  modified_base (18)..(18): 2'-OMe-nucleotide
  modified_base (19)..(19): 2'-OMe-nucleotide
  modified_base (20)..(20): 2'-OMe-nucleotide
  misc_feature (20)..(21): /note="phosphorothioate bond"
  modified_base (21)..(21): Locked nucleic acid (LNA) nucleotide
  misc_feature (21)..(22): /note="phosphorothioate bond"
  modified_base (22)..(22): Locked nucleic acid (LNA) nucleotide
tttgaguuaucaaggcacautt

SEQ ID NO: 1252 - DNA, 22 bp, Artificial Sequence
  source: /note="Description of Artificial Sequence: Synthetic oligonucleotide"
  source: /note="Description of Combined DNA/RNA Molecule: Synthetic oligonucleotide"
  modified_base (1)..(1): GalNAc-morpholino-thymidine analog 3
  misc_feature (1)..(2): /note="phosphorothioate bond"
  modified_base (2)..(2): GalNAc-morpholino-thymidine analog 3
  misc_feature (2)..(3): /note="phosphorothioate bond"
  modified_base (3)..(3): GalNAc-morpholino-thymidine analog 3
  modified_base (4)..(4): 2'-OMe-nucleotide
  modified_base (5)..(5): 2'-OMe-nucleotide
  modified_base (6)..(6): 2'-OMe-nucleotide
  modified_base (7)..(7): 2'-OMe-nucleotide
  modified_base (8)..(8): 2'-fluoro-nucleotide
  modified_base (9)..(9): 2'-OMe-nucleotide
  modified_base (10)..(10): 2'-fluoro-nucleotide
  modified_base (11)..(11): 2'-fluoro-nucleotide
  modified_base (12)..(12): 2'-fluoro-nucleotide
  modified_base (13)..(13): 2'-OMe-nucleotide
  modified_base (14)..(14): 2'-OMe-nucleotide
  modified_base (15)..(15): 2'-OMe-nucleotide
  modified_base (16)..(16): 2'-OMe-nucleotide
  modified_base (17)..(17): 2'-OMe-nucleotide
  modified_base (18)..(18): 2'-OMe-nucleotide
  modified_base (19)..(19): 2'-OMe-nucleotide
  modified_base (20)..(20): 2'-OMe-nucleotide
  misc_feature (20)..(21): /note="phosphorothioate bond"
  modified_base (21)..(21): Locked nucleic acid (LNA) nucleotide
  misc_feature (21)..(22): /note="phosphorothioate bond"
  modified_base (22)..(22): Locked nucleic acid (LNA) nucleotide
tttgaguuaucaaggcacautt

SEQ ID NO: 1253 - DNA, 22 bp, Artificial Sequence
  source: /note="Description of Artificial Sequence: Synthetic oligonucleotide"
  source: /note="Description of Combined DNA/RNA Molecule: Synthetic oligonucleotide"
  modified_base (1)..(1): GalNAc-morpholino-thymidine analog 3
  misc_feature (1)..(2): /note="phosphorothioate bond"
  modified_base (2)..(2): GalNAc-morpholino-thymidine analog 3
  misc_feature (2)..(3): /note="phosphorothioate bond"
  modified_base (3)..(3): GalNAc-morpholino-thymidine analog 3
  modified_base (4)..(4): 2'-OMe-nucleotide
  modified_base (5)..(5): 2'-OMe-nucleotide
  modified_base (6)..(6): 2'-OMe-nucleotide
  modified_base (7)..(7): 2'-OMe-nucleotide
  modified_base (8)..(8): 2'-fluoro-nucleotide
  modified_base (9)..(9): 2'-OMe-nucleotide
  modified_base (10)..(10): 2'-fluoro-nucleotide
  modified_base (11)..(11): 2'-fluoro-nucleotide
  modified_base (12)..(12): 2'-fluoro-nucleotide
  modified_base (13)..(13): 2'-OMe-nucleotide
  modified_base (14)..(14): 2'-OMe-nucleotide
  modified_base (15)..(15): 2'-OMe-nucleotide
  modified_base (16)..(16): 2'-OMe-nucleotide
  modified_base (17)..(17): 2'-OMe-nucleotide
  modified_base (18)..(18): 2'-OMe-nucleotide
  modified_base (19)..(19): 2'-OMe-nucleotide
  modified_base (20)..(20): 2'-OMe-nucleotide
  misc_feature (20)..(21): /note="phosphorothioate bond"
  modified_base (21)..(21): Locked nucleic acid (LNA) nucleotide
  misc_feature (21)..(22): /note="phosphorothioate bond"
  modified_base (22)..(22): Locked nucleic acid (LNA) nucleotide
tttgaguuaucaaggcacautt

SEQ ID NO: 1254 - DNA, 22 bp, Artificial Sequence
  source: /note="Description of Artificial Sequence: Synthetic oligonucleotide"
  source: /note="Description of Combined DNA/RNA Molecule: Synthetic oligonucleotide"
  modified_base (1)..(1): GalNAc-morpholino-thymidine analog 3
  misc_feature (1)..(2): /note="phosphorothioate bond"
  modified_base (2)..(2): GalNAc-morpholino-thymidine analog 3
  misc_feature (2)..(3): /note="phosphorothioate bond"
  modified_base (3)..(3): GalNAc-morpholino-thymidine analog 3
  modified_base (4)..(4): 2'-OMe-nucleotide
  modified_base (5)..(5): 2'-OMe-nucleotide
  modified_base (6)..(6): 2'-OMe-nucleotide
  modified_base (7)..(7): 2'-OMe-nucleotide
  modified_base (8)..(8): 2'-fluoro-nucleotide
  modified_base (9)..(9): 2'-OMe-nucleotide
  modified_base (10)..(10): 2'-fluoro-nucleotide
  modified_base (11)..(11): 2'-fluoro-nucleotide
  modified_base (12)..(12): 2'-fluoro-nucleotide
  modified_base (13)..(13): 2'-OMe-nucleotide
  modified_base (14)..(14): 2'-OMe-nucleotide
  modified_base (15)..(15): 2'-OMe-nucleotide
  modified_base (16)..(16): 2'-OMe-nucleotide
  modified_base (17)..(17): 2'-OMe-nucleotide
  modified_base (18)..(18): 2'-OMe-nucleotide
  modified_base (19)..(19): 2'-OMe-nucleotide
  modified_base (20)..(20): 2'-OMe-nucleotide
  misc_feature (20)..(21): /note="phosphorothioate bond"
  modified_base (21)..(21): Locked nucleic acid (LNA) nucleotide
  misc_feature (21)..(22): /note="phosphorothioate bond"
  modified_base (22)..(22): Locked nucleic acid (LNA) nucleotide
tttgaguuaucaaggcacautt

SEQ ID NO: 1255 - DNA, 22 bp, Artificial Sequence
  source: /note="Description of Artificial Sequence: Synthetic oligonucleotide"
  source: /note="Description of Combined DNA/RNA Molecule: Synthetic oligonucleotide"
  modified_base (1)..(1): GalNAc-morpholino-thymidine analog 3
  misc_feature (1)..(2): /note="phosphorothioate bond"
  modified_base (2)..(2): GalNAc-morpholino-thymidine analog 3
  misc_feature (2)..(3): /note="phosphorothioate bond"
  modified_base (3)..(3): GalNAc-morpholino-thymidine analog 3
  modified_base (4)..(4): 2'-OMe-nucleotide
  modified_base (5)..(5): 2'-OMe-nucleotide
  modified_base (6)..(6): 2'-OMe-nucleotide
  modified_base (7)..(7): 2'-OMe-nucleotide
  modified_base (8)..(8): 2'-fluoro-nucleotide
  modified_base (9)..(9): 2'-OMe-nucleotide
  modified_base (10)..(10): 2'-fluoro-nucleotide
  modified_base (11)..(11): 2'-fluoro-nucleotide
  modified_base (12)..(12): 2'-fluoro-nucleotide
  modified_base (13)..(13): 2'-OMe-nucleotide
  modified_base (14)..(14): 2'-OMe-nucleotide
  modified_base (15)..(15): 2'-OMe-nucleotide
  modified_base (16)..(16): 2'-OMe-nucleotide
  modified_base (17)..(17): 2'-OMe-nucleotide
  modified_base (18)..(18): 2'-OMe-nucleotide
  modified_base (19)..(19): 2'-OMe-nucleotide
  modified_base (20)..(20): 2'-OMe-nucleotide
  misc_feature (20)..(21): /note="phosphorothioate bond"
  modified_base (21)..(21): Locked nucleic acid (LNA) nucleotide
  misc_feature (21)..(22): /note="phosphorothioate bond"
  modified_base (22)..(22): Locked nucleic acid (LNA) nucleotide
tttgaguuaucaaggcacautt

SEQ ID NO: 1256 - DNA, 22 bp, Artificial Sequence
  source: /note="Description of Artificial Sequence: Synthetic oligonucleotide"
  source: /note="Description of Combined DNA/RNA Molecule: Synthetic oligonucleotide"
  modified_base (1)..(1): GalNAc-morpholino-thymidine analog 3
  misc_feature (1)..(2): /note="phosphorothioate bond"
  modified_base (2)..(2): GalNAc-morpholino-thymidine analog 3
  misc_feature (2)..(3): /note="phosphorothioate bond"
  modified_base (3)..(3): GalNAc-morpholino-thymidine analog 3
  modified_base (4)..(4): 2'-OMe-nucleotide
  modified_base (5)..(5): 2'-OMe-nucleotide
  modified_base (6)..(6): 2'-OMe-nucleotide
  modified_base (7)..(7): 2'-OMe-nucleotide
  modified_base (8)..(8): 2'-fluoro-nucleotide
  modified_base (9)..(9): 2'-OMe-nucleotide
  modified_base (10)..(10): 2'-fluoro-nucleotide
  modified_base (11)..(11): 2'-fluoro-nucleotide
  modified_base (12)..(12): 2'-fluoro-nucleotide
  modified_base (13)..(13): 2'-OMe-nucleotide
  modified_base (14)..(14): 2'-OMe-nucleotide
  modified_base (15)..(15): 2'-OMe-nucleotide
  modified_base (16)..(16): 2'-OMe-nucleotide
  modified_base (17)..(17): 2'-OMe-nucleotide
  modified_base (18)..(18): 2'-OMe-nucleotide
  modified_base (19)..(19): 2'-OMe-nucleotide
  modified_base (20)..(20): 2'-OMe-nucleotide
  misc_feature (20)..(21): /note="phosphorothioate bond"
  modified_base (21)..(21): Locked nucleic acid (LNA) nucleotide
  misc_feature (21)..(22): /note="phosphorothioate bond"
  modified_base (22)..(22): Locked nucleic acid (LNA) nucleotide
tttgaguuaucaaggcacautt

SEQ ID NO: 1257 - DNA, 22 bp, Artificial Sequence
  source: /note="Description of Artificial Sequence: Synthetic oligonucleotide"
  source: /note="Description of Combined DNA/RNA Molecule: Synthetic oligonucleotide"
  modified_base (1)..(1): GalNAc-morpholino-thymidine analog 3
  misc_feature (1)..(2): /note="phosphorothioate bond"
  modified_base (2)..(2): GalNAc-morpholino-thymidine analog 3
  misc_feature (2)..(3): /note="phosphorothioate bond"
  modified_base (3)..(3): GalNAc-morpholino-thymidine analog 3
  modified_base (4)..(4): 2'-OMe-nucleotide
  modified_base (5)..(5): 2'-OMe-nucleotide
  modified_base (6)..(6): 2'-OMe-nucleotide
  modified_base (7)..(7): 2'-OMe-nucleotide
  modified_base (8)..(8): 2'-fluoro-nucleotide
  modified_base (9)..(9): 2'-OMe-nucleotide
  modified_base (10)..(10): 2'-fluoro-nucleotide
  modified_base (11)..(11): 2'-fluoro-nucleotide
  modified_base (12)..(12): 2'-fluoro-nucleotide
  modified_base (13)..(13): 2'-OMe-nucleotide
  modified_base (14)..(14): 2'-OMe-nucleotide
  modified_base (15)..(15): 2'-OMe-nucleotide
  modified_base (16)..(16): 2'-OMe-nucleotide
  modified_base (17)..(17): 2'-OMe-nucleotide
  modified_base (18)..(18): 2'-OMe-nucleotide
  modified_base (19)..(19): 2'-OMe-nucleotide
  modified_base (20)..(20): 2'-OMe-nucleotide
  misc_feature (20)..(21): /note="phosphorothioate bond"
  modified_base (21)..(21): Locked nucleic acid (LNA) nucleotide
  misc_feature (21)..(22): /note="phosphorothioate bond"
  modified_base (22)..(22): Locked nucleic acid (LNA) nucleotide
tttgaguuaucaaggcacautt

SEQ ID NO: 1258 - DNA, 22 bp, Artificial Sequence
  source: /note="Description of Artificial Sequence: Synthetic oligonucleotide"
  source: /note="Description of Combined DNA/RNA Molecule: Synthetic oligonucleotide"
  modified_base (1)..(1): GalNAc-morpholino-thymidine analog 3
  misc_feature (1)..(2): /note="phosphorothioate bond"
  modified_base (2)..(2): GalNAc-morpholino-thymidine analog 3
  misc_feature (2)..(3): /note="phosphorothioate bond"
  modified_base (3)..(3): GalNAc-morpholino-thymidine analog 3
  modified_base (4)..(4): 2'-OMe-nucleotide
  modified_base (5)..(5): 2'-OMe-nucleotide
  modified_base (6)..(6): 2'-OMe-nucleotide
  modified_base (7)..(7): 2'-OMe-nucleotide
  modified_base (8)..(8): 2'-fluoro-nucleotide
  modified_base (9)..(9): 2'-OMe-nucleotide
  modified_base (10)..(10): 2'-fluoro-nucleotide
  modified_base (11)..(11): 2'-fluoro-nucleotide
  modified_base (12)..(12): 2'-fluoro-nucleotide
  modified_base (13)..(13): 2'-OMe-nucleotide
  modified_base (14)..(14): 2'-OMe-nucleotide
  modified_base (15)..(15): 2'-OMe-nucleotide
  modified_base (16)..(16): 2'-OMe-nucleotide
  modified_base (17)..(17): 2'-OMe-nucleotide
  modified_base (18)..(18): 2'-OMe-nucleotide
  modified_base (19)..(19): 2'-OMe-nucleotide
  modified_base (20)..(20): 2'-OMe-nucleotide
  misc_feature (20)..(21): /note="phosphorothioate bond"
  modified_base (21)..(21): Locked nucleic acid (LNA) nucleotide
  misc_feature (21)..(22): /note="phosphorothioate bond"
  modified_base (22)..(22): Locked nucleic acid (LNA) nucleotide
tttgaguuaucaaggcacautt

SEQ ID NO: 1259 - DNA, 22 bp, Artificial Sequence
  source: /note="Description of Artificial Sequence: Synthetic oligonucleotide"
  source: /note="Description of Combined DNA/RNA Molecule: Synthetic oligonucleotide"
  modified_base (1)..(1): GalNAc-morpholino-thymidine analog 3
  modified_base (2)..(2): GalNAc-morpholino-thymidine analog 3
  modified_base (3)..(3): GalNAc-morpholino-thymidine analog 3
  modified_base (4)..(4): Locked nucleic acid (LNA) nucleotide
  modified_base (5)..(5): Locked nucleic acid (LNA) nucleotide
  modified_base (6)..(6): 2'-OMe-nucleotide
  modified_base (7)..(7): 2'-OMe-nucleotide
  modified_base (8)..(8): 2'-fluoro-nucleotide
  modified_base (9)..(9): 2'-OMe-nucleotide
  modified_base (10)..(10): 2'-fluoro-nucleotide
  modified_base (11)..(11): 2'-fluoro-nucleotide
  modified_base (12)..(12): 2'-fluoro-nucleotide
  modified_base (13)..(13): 2'-OMe-nucleotide
  modified_base (14)..(14): 2'-OMe-nucleotide
  modified_base (15)..(15): 2'-OMe-nucleotide
  modified_base (16)..(16): 2'-OMe-nucleotide
  modified_base (17)..(17): 2'-OMe-nucleotide
  modified_base (18)..(18): 2'-OMe-nucleotide
  modified_base (19)..(19): 2'-OMe-nucleotide
  modified_base (20)..(20): 2'-OMe-nucleotide
  modified_base (21)..(21): Locked nucleic acid (LNA) nucleotide
  modified_base (22)..(22): Locked nucleic acid (LNA) nucleotide
tttgaguuaucaaggcacautt

SEQ ID NO: 1260 - DNA, 22 bp, Artificial Sequence
  source: /note="Description of Artificial Sequence: Synthetic oligonucleotide"
  source: /note="Description of Combined DNA/RNA Molecule: Synthetic oligonucleotide"
  modified_base (1)..(1): GalNAc-morpholino-thymidine analog 3
  modified_base (2)..(2): GalNAc-morpholino-thymidine analog 3
  modified_base (3)..(3): GalNAc-morpholino-thymidine analog 3
  modified_base (4)..(4): Locked nucleic acid (LNA) nucleotide
  modified_base (5)..(5): Locked nucleic acid (LNA) nucleotide
  modified_base (6)..(6): 2'-OMe-nucleotide
  modified_base (7)..(7): 2'-OMe-nucleotide
  modified_base (8)..(8): 2'-fluoro-nucleotide
  modified_base (9)..(9): 2'-OMe-nucleotide
  modified_base (10)..(10): 2'-fluoro-nucleotide
  modified_base (11)..(11): 2'-fluoro-nucleotide
  modified_base (12)..(12): 2'-fluoro-nucleotide
  modified_base (13)..(13): 2'-OMe-nucleotide
  modified_base (14)..(14): 2'-OMe-nucleotide
  modified_base (15)..(15): 2'-OMe-nucleotide
  modified_base (16)..(16): 2'-OMe-nucleotide
  modified_base (17)..(17): 2'-OMe-nucleotide
  modified_base (18)..(18): 2'-OMe-nucleotide
  modified_base (19)..(19): 2'-OMe-nucleotide
  modified_base (20)..(20): 2'-OMe-nucleotide
  modified_base (21)..(21): Locked nucleic acid (LNA) nucleotide
  modified_base (22)..(22): Locked nucleic acid (LNA) nucleotide
tttgaguuaucaaggcacautt

SEQ ID NO: 1261 - DNA, 22 bp, Artificial Sequence
  source: /note="Description of Artificial Sequence: Synthetic oligonucleotide"
  source: /note="Description of Combined DNA/RNA Molecule: Synthetic oligonucleotide"
  modified_base (1)..(1): GalNAc-morpholino-thymidine analog 3
  modified_base (2)..(2): GalNAc-morpholino-thymidine analog 3
  modified_base (3)..(3): GalNAc-morpholino-thymidine analog 3
  modified_base (4)..(4): Locked nucleic acid (LNA) nucleotide
  modified_base (5)..(5): Locked nucleic acid (LNA) nucleotide
  modified_base (6)..(6): 2'-OMe-nucleotide
  modified_base (7)..(7): 2'-OMe-nucleotide
  modified_base (8)..(8): 2'-fluoro-nucleotide
  modified_base (9)..(9): 2'-OMe-nucleotide
  modified_base (10)..(10): 2'-fluoro-nucleotide
  modified_base (11)..(11): 2'-fluoro-nucleotide
  modified_base (12)..(12): 2'-fluoro-nucleotide
  modified_base (13)..(13): 2'-OMe-nucleotide
  modified_base (14)..(14): 2'-OMe-nucleotide
  modified_base (15)..(15): 2'-OMe-nucleotide
  modified_base (16)..(16): 2'-OMe-nucleotide
  modified_base (17)..(17): 2'-OMe-nucleotide
  modified_base (18)..(18): 2'-OMe-nucleotide
  modified_base (19)..(19): 2'-OMe-nucleotide
  modified_base (20)..(20): 2'-OMe-nucleotide
  modified_base (21)..(21): Locked nucleic acid (LNA) nucleotide
  modified_base (22)..(22): Locked nucleic acid (LNA) nucleotide
tttgaguuaucaaggcacautt

SEQ ID NO: 1262 - DNA, 22 bp, Artificial Sequence
  source: /note="Description of Artificial Sequence: Synthetic oligonucleotide"
  source: /note="Description of Combined DNA/RNA Molecule: Synthetic oligonucleotide"
  modified_base (1)..(1): GalNAc-morpholino-thymidine analog 3
  modified_base (2)..(2): GalNAc-morpholino-thymidine analog 3
  modified_base (3)..(3): GalNAc-morpholino-thymidine analog 3
  modified_base (4)..(4): Locked nucleic acid (LNA) nucleotide
  modified_base (5)..(5): Locked nucleic acid (LNA) nucleotide
  modified_base (6)..(6): 2'-OMe-nucleotide
  modified_base (7)..(7): 2'-OMe-nucleotide
  modified_base (8)..(8): 2'-fluoro-nucleotide
  modified_base (9)..(9): 2'-OMe-nucleotide
  modified_base (10)..(10): 2'-fluoro-nucleotide
  modified_base (11)..(11): 2'-fluoro-nucleotide
  modified_base (12)..(12): 2'-fluoro-nucleotide
  modified_base (13)..(13): 2'-OMe-nucleotide
  modified_base (14)..(14): 2'-OMe-nucleotide
  modified_base (15)..(15): 2'-OMe-nucleotide
  modified_base (16)..(16): 2'-OMe-nucleotide
  modified_base (17)..(17): 2'-OMe-nucleotide
  modified_base (18)..(18): 2'-OMe-nucleotide
  modified_base (19)..(19): 2'-OMe-nucleotide
  modified_base (20)..(20): 2'-OMe-nucleotide
  modified_base (21)..(21): Locked nucleic acid (LNA) nucleotide
  modified_base (22)..(22): Locked nucleic acid (LNA) nucleotide
tttgaguuaucaaggcacautt

SEQ ID NO: 1263 - DNA, 22 bp, Artificial Sequence
  source: /note="Description of Artificial Sequence: Synthetic oligonucleotide"
  source: /note="Description of Combined DNA/RNA Molecule: Synthetic oligonucleotide"
  modified_base (1)..(1): GalNAc-morpholino-thymidine analog 3
  modified_base (2)..(2): GalNAc-morpholino-thymidine analog 3
  modified_base (3)..(3): GalNAc-morpholino-thymidine analog 3
  modified_base (4)..(4): Locked nucleic acid (LNA) nucleotide
  modified_base (5)..(5): Locked nucleic acid (LNA) nucleotide
  modified_base (6)..(6): 2'-OMe-nucleotide
  modified_base (7)..(7): 2'-OMe-nucleotide
  modified_base (8)..(8): 2'-fluoro-nucleotide
  modified_base (9)..(9): 2'-OMe-nucleotide
  modified_base (10)..(10): 2'-fluoro-nucleotide
  modified_base (11)..(11): 2'-fluoro-nucleotide
  modified_base (12)..(12): 2'-fluoro-nucleotide
  modified_base (13)..(13): 2'-OMe-nucleotide
  modified_base (14)..(14): 2'-OMe-nucleotide
  modified_base (15)..(15): 2'-OMe-nucleotide
  modified_base (16)..(16): 2'-OMe-nucleotide
  modified_base (17)..(17): 2'-OMe-nucleotide
  modified_base (18)..(18): 2'-OMe-nucleotide
  modified_base (19)..(19): 2'-OMe-nucleotide
  modified_base (20)..(20): 2'-OMe-nucleotide
  modified_base (21)..(21): Locked nucleic acid (LNA) nucleotide
  modified_base (22)..(22): Locked nucleic acid (LNA) nucleotide
tttgaguuaucaaggcacautt

SEQ ID NO: 1264 - DNA, 22 bp, Artificial Sequence
  source: /note="Description of Artificial Sequence: Synthetic oligonucleotide"
  source: /note="Description of Combined DNA/RNA Molecule: Synthetic oligonucleotide"
  modified_base (1)..(1): GalNAc-morpholino-thymidine analog 3
  misc_feature (1)..(2): /note="phosphorothioate bond"
  modified_base (2)..(2): GalNAc-morpholino-thymidine analog 3
  misc_feature (2)..(3): /note="phosphorothioate bond"
  modified_base (3)..(3): GalNAc-morpholino-thymidine analog 3
  modified_base (4)..(4): Locked nucleic acid (LNA) nucleotide
  modified_base (5)..(5): Locked nucleic acid (LNA) nucleotide
  modified_base (6)..(6): 2'-OMe-nucleotide
  modified_base (7)..(7): 2'-OMe-nucleotide
  modified_base (8)..(8): 2'-fluoro-nucleotide
  modified_base (9)..(9): 2'-OMe-nucleotide
  modified_base (10)..(10): 2'-fluoro-nucleotide
  modified_base (11)..(11): 2'-fluoro-nucleotide
  modified_base (12)..(12): 2'-fluoro-nucleotide
  modified_base (13)..(13): 2'-OMe-nucleotide
  modified_base (14)..(14): 2'-OMe-nucleotide
  modified_base (15)..(15): 2'-OMe-nucleotide
  modified_base (16)..(16): 2'-OMe-nucleotide
  modified_base (17)..(17): 2'-OMe-nucleotide
  modified_base (18)..(18): 2'-OMe-nucleotide
  modified_base (19)..(19): 2'-OMe-nucleotide
  modified_base (20)..(20): 2'-OMe-nucleotide
  misc_feature (20)..(21): /note="phosphorothioate bond"
  modified_base (21)..(21): Locked nucleic acid (LNA) nucleotide
  misc_feature (21)..(22): /note="phosphorothioate bond"
  modified_base (22)..(22): Locked nucleic acid (LNA) nucleotide
tttgaguuaucaaggcacautt

SEQ ID NO: 1265 - DNA, 22 bp, Artificial Sequence
  source: /note="Description of Artificial Sequence: Synthetic oligonucleotide"
  source: /note="Description of Combined DNA/RNA Molecule: Synthetic oligonucleotide"
  modified_base (1)..(1): GalNAc-morpholino-thymidine analog 3
  misc_feature (1)..(2): /note="phosphorothioate bond"
  modified_base (2)..(2): GalNAc-morpholino-thymidine analog 3
  misc_feature (2)..(3): /note="phosphorothioate bond"
  modified_base (3)..(3): GalNAc-morpholino-thymidine analog 3
  modified_base (4)..(4): Locked nucleic acid (LNA) nucleotide
  modified_base (5)..(5): Locked nucleic acid (LNA) nucleotide
  modified_base (6)..(6): 2'-OMe-nucleotide
  modified_base (7)..(7): 2'-OMe-nucleotide
  modified_base (8)..(8): 2'-fluoro-nucleotide
  modified_base (9)..(9): 2'-OMe-nucleotide
  modified_base (10)..(10): 2'-fluoro-nucleotide
  modified_base (11)..(11): 2'-fluoro-nucleotide
  modified_base (12)..(12): 2'-fluoro-nucleotide
  modified_base (13)..(13): 2'-OMe-nucleotide
  modified_base (14)..(14): 2'-OMe-nucleotide
  modified_base (15)..(15): 2'-OMe-nucleotide
  modified_base (16)..(16): 2'-OMe-nucleotide
  modified_base (17)..(17): 2'-OMe-nucleotide
  modified_base (18)..(18): 2'-OMe-nucleotide
  modified_base (19)..(19): 2'-OMe-nucleotide
  modified_base (20)..(20): 2'-OMe-nucleotide
  misc_feature (20)..(21): /note="phosphorothioate bond"
  modified_base (21)..(21): Locked nucleic acid (LNA) nucleotide
  misc_feature (21)..(22): /note="phosphorothioate bond"
  modified_base (22)..(22): Locked nucleic acid (LNA) nucleotide
tttgaguuaucaaggcacautt

SEQ ID NO: 1266 - DNA, 22 bp, Artificial Sequence
  source: /note="Description of Artificial Sequence: Synthetic oligonucleotide"
  source: /note="Description of Combined DNA/RNA Molecule: Synthetic oligonucleotide"
  modified_base (1)..(1): GalNAc-morpholino-thymidine analog 3
  misc_feature (1)..(2): /note="phosphorothioate bond"
  modified_base (2)..(2): GalNAc-morpholino-thymidine analog 3
  misc_feature (2)..(3): /note="phosphorothioate bond"
  modified_base (3)..(3): GalNAc-morpholino-thymidine analog 3
  modified_base (4)..(4): Locked nucleic acid (LNA) nucleotide
  modified_base (5)..(5): Locked nucleic acid (LNA) nucleotide
  modified_base (6)..(6): 2'-OMe-nucleotide
  modified_base (7)..(7): 2'-OMe-nucleotide
  modified_base (8)..(8): 2'-fluoro-nucleotide
  modified_base (9)..(9): 2'-OMe-nucleotide
  modified_base (10)..(10): 2'-fluoro-nucleotide
  modified_base (11)..(11): 2'-fluoro-nucleotide
  modified_base (12)..(12): 2'-fluoro-nucleotide
  modified_base (13)..(13): 2'-OMe-nucleotide
  modified_base (14)..(14): 2'-OMe-nucleotide
  modified_base (15)..(15): 2'-OMe-nucleotide
  modified_base (16)..(16): 2'-OMe-nucleotide
  modified_base (17)..(17): 2'-OMe-nucleotide
  modified_base (18)..(18): 2'-OMe-nucleotide
  modified_base (19)..(19): 2'-OMe-nucleotide
  modified_base (20)..(20): 2'-OMe-nucleotide
  misc_feature (20)..(21): /note="phosphorothioate bond"
  modified_base (21)..(21): Locked nucleic acid (LNA) nucleotide
  misc_feature (21)..(22): /note="phosphorothioate bond"
  modified_base (22)..(22): Locked nucleic acid (LNA) nucleotide
tttgaguuaucaaggcacautt

SEQ ID NO: 1267 - DNA, 22 bp, Artificial Sequence
  source: /note="Description of Artificial Sequence: Synthetic oligonucleotide"
  source: /note="Description of Combined DNA/RNA Molecule: Synthetic oligonucleotide"
  modified_base (1)..(1): GalNAc-morpholino-thymidine analog 3
  misc_feature (1)..(2): /note="phosphorothioate bond"
  modified_base (2)..(2): GalNAc-morpholino-thymidine analog 3
  misc_feature (2)..(3): /note="phosphorothioate bond"
  modified_base (3)..(3): GalNAc-morpholino-thymidine analog 3
  modified_base (4)..(4): Locked nucleic acid (LNA) nucleotide
  modified_base (5)..(5): Locked nucleic acid (LNA) nucleotide
  modified_base (6)..(6): 2'-OMe-nucleotide
  modified_base (7)..(7): 2'-OMe-nucleotide
  modified_base (8)..(8): 2'-fluoro-nucleotide
  modified_base (9)..(9): 2'-OMe-nucleotide
  modified_base (10)..(10): 2'-fluoro-nucleotide
  modified_base (11)..(11): 2'-fluoro-nucleotide
  modified_base (12)..(12): 2'-fluoro-nucleotide
  modified_base (13)..(13): 2'-OMe-nucleotide
  modified_base (14)..(14): 2'-OMe-nucleotide
  modified_base (15)..(15): 2'-OMe-nucleotide
  modified_base (16)..(16): 2'-OMe-nucleotide
  modified_base (17)..(17): 2'-OMe-nucleotide
  modified_base (18)..(18): 2'-OMe-nucleotide
  modified_base (19)..(19): 2'-OMe-nucleotide
  modified_base (20)..(20): 2'-OMe-nucleotide
  misc_feature (20)..(21): /note="phosphorothioate bond"
  modified_base (21)..(21): Locked nucleic acid (LNA) nucleotide
  misc_feature (21)..(22): /note="phosphorothioate bond"
  modified_base (22)..(22): Locked nucleic acid (LNA) nucleotide
tttgaguuaucaaggcacautt

SEQ ID NO: 1268 - DNA, 22 bp, Artificial Sequence
  source: /note="Description of Artificial Sequence: Synthetic oligonucleotide"
  source: /note="Description of Combined DNA/RNA Molecule: Synthetic oligonucleotide"
  modified_base (1)..(1): GalNAc-morpholino-thymidine analog 3
  misc_feature (1)..(2): /note="phosphorothioate bond"
  modified_base (2)..(2): GalNAc-morpholino-thymidine analog 3
  misc_feature (2)..(3): /note="phosphorothioate bond"
  modified_base (3)..(3): GalNAc-morpholino-thymidine analog 3
  modified_base (4)..(4): Locked nucleic acid (LNA) nucleotide
  modified_base (5)..(5): Locked nucleic acid (LNA) nucleotide
  modified_base (6)..(6): 2'-OMe-nucleotide
  modified_base (7)..(7): 2'-OMe-nucleotide
  modified_base (8)..(8): 2'-fluoro-nucleotide
  modified_base (9)..(9): 2'-OMe-nucleotide
  modified_base (10)..(10): 2'-fluoro-nucleotide
  modified_base (11)..(11): 2'-fluoro-nucleotide
  modified_base (12)..(12): 2'-fluoro-nucleotide
  modified_base (13)..(13): 2'-OMe-nucleotide
  modified_base (14)..(14): 2'-OMe-nucleotide
  modified_base (15)..(15): 2'-OMe-nucleotide
  modified_base (16)..(16): 2'-OMe-nucleotide
  modified_base (17)..(17): 2'-OMe-nucleotide
  modified_base (18)..(18): 2'-OMe-nucleotide
  modified_base (19)..(19): 2'-OMe-nucleotide
  modified_base (20)..(20): 2'-OMe-nucleotide
  misc_feature (20)..(21): /note="phosphorothioate bond"
  modified_base (21)..(21): Locked nucleic acid (LNA) nucleotide
  misc_feature (21)..(22): /note="phosphorothioate bond"
  modified_base (22)..(22): Locked nucleic acid (LNA) nucleotide
tttgaguuaucaaggcacautt

SEQ ID NO: 1269 - DNA, 24 bp, Artificial Sequence
  source: /note="Description of Artificial Sequence: Synthetic oligonucleotide"
  source: /note="Description of Combined DNA/RNA Molecule: Synthetic oligonucleotide"
  modified_base (1)..(1): GalNAc-morpholino-thymidine analog 3
  modified_base (2)..(2): GalNAc-morpholino-thymidine analog 3
  modified_base (3)..(3): GalNAc-morpholino-thymidine analog 3
  modified_base (4)..(4): 2'-OMe-nucleotide
  modified_base (5)..(5): 2'-OMe-nucleotide
  modified_base (6)..(6): 2'-OMe-nucleotide
  modified_base (7)..(7): 2'-OMe-nucleotide
  modified_base (8)..(8): 2'-fluoro-nucleotide
  modified_base (9)..(9): 2'-OMe-nucleotide
  modified_base (10)..(10): 2'-fluoro-nucleotide
  modified_base (11)..(11): 2'-fluoro-nucleotide
  modified_base (12)..(12): 2'-fluoro-nucleotide
  modified_base (13)..(13): 2'-OMe-nucleotide
  modified_base (14)..(14): 2'-OMe-nucleotide
  modified_base (15)..(15): 2'-OMe-nucleotide
  modified_base (16)..(16): 2'-OMe-nucleotide
  modified_base (17)..(17): 2'-OMe-nucleotide
  modified_base (18)..(18): 2'-OMe-nucleotide
  modified_base (19)..(19): 2'-OMe-nucleotide
  modified_base (20)..(20): 2'-OMe-nucleotide
  modified_base (21)..(21): 2'-OMe-nucleotide
  modified_base (22)..(22): 2'-OMe-nucleotide
  modified_base (23)..(23): Locked nucleic acid (LNA) nucleotide
  modified_base (24)..(24): Locked nucleic acid (LNA) nucleotide
tttgaguuaucaaggcacauactt

SEQ ID NO: 1270 - DNA, 24 bp, Artificial Sequence
  source: /note="Description of Artificial Sequence: Synthetic oligonucleotide"
  source: /note="Description of Combined DNA/RNA Molecule: Synthetic oligonucleotide"
  modified_base (1)..(1): GalNAc-morpholino-thymidine analog 3
  modified_base (2)..(2): GalNAc-morpholino-thymidine analog 3
  modified_base (3)..(3): GalNAc-morpholino-thymidine analog 3
  modified_base (4)..(4): 2'-OMe-nucleotide
  modified_base (5)..(5): 2'-OMe-nucleotide
  modified_base (6)..(6): 2'-OMe-nucleotide
  modified_base (7)..(7): 2'-OMe-nucleotide
  modified_base (8)..(8): 2'-fluoro-nucleotide
  modified_base (9)..(9): 2'-OMe-nucleotide
  modified_base (10)..(10): 2'-fluoro-nucleotide
  modified_base (11)..(11): 2'-fluoro-nucleotide
  modified_base (12)..(12): 2'-fluoro-nucleotide
  modified_base (13)..(13): 2'-OMe-nucleotide
  modified_base (14)..(14): 2'-OMe-nucleotide
  modified_base (15)..(15): 2'-OMe-nucleotide
  modified_base (16)..(16): 2'-OMe-nucleotide
  modified_base (17)..(17): 2'-OMe-nucleotide
  modified_base (18)..(18): 2'-OMe-nucleotide
  modified_base (19)..(19): 2'-OMe-nucleotide
  modified_base (20)..(20): 2'-OMe-nucleotide
  modified_base (21)..(21): 2'-OMe-nucleotide
  modified_base (22)..(22): 2'-OMe-nucleotide
  modified_base (23)..(23): Locked nucleic acid (LNA) nucleotide
  modified_base (24)..(24): Locked nucleic acid (LNA) nucleotide
tttgaguuaucaaggcacauactt

SEQ ID NO: 1271 - DNA, 24 bp, Artificial Sequence
  source: /note="Description of Artificial Sequence: Synthetic oligonucleotide"
  source: /note="Description of Combined DNA/RNA Molecule: Synthetic oligonucleotide"
  modified_base (1)..(1): GalNAc-morpholino-thymidine analog 3
  modified_base (2)..(2): GalNAc-morpholino-thymidine analog 3
  modified_base (3)..(3): GalNAc-morpholino-thymidine analog 3
  modified_base (4)..(4): 2'-OMe-nucleotide
  modified_base (5)..(5): 2'-OMe-nucleotide
  modified_base (6)..(6): 2'-OMe-nucleotide
  modified_base (7)..(7): 2'-OMe-nucleotide
  modified_base (8)..(8): 2'-fluoro-nucleotide
  modified_base (9)..(9): 2'-OMe-nucleotide
  modified_base (10)..(10): 2'-fluoro-nucleotide
  modified_base (11)..(11): 2'-fluoro-nucleotide
  modified_base (12)..(12): 2'-fluoro-nucleotide
  modified_base (13)..(13): 2'-OMe-nucleotide
  modified_base (14)..(14): 2'-OMe-nucleotide
  modified_base (15)..(15): 2'-OMe-nucleotide
  modified_base (16)..(16): 2'-OMe-nucleotide
  modified_base (17)..(17): 2'-OMe-nucleotide
  modified_base (18)..(18): 2'-OMe-nucleotide
  modified_base (19)..(19): 2'-OMe-nucleotide
  modified_base (20)..(20): 2'-OMe-nucleotide
  modified_base (21)..(21): 2'-OMe-nucleotide
  modified_base (22)..(22): 2'-OMe-nucleotide
  modified_base (23)..(23): Locked nucleic acid (LNA) nucleotide
  modified_base (24)..(24): Locked nucleic acid (LNA) nucleotide
tttgaguuaucaaggcacauactt

SEQ ID NO: 1272 - DNA, 24 bp, Artificial Sequence
  source: /note="Description of Artificial Sequence: Synthetic oligonucleotide"
  source: /note="Description of Combined DNA/RNA Molecule: Synthetic oligonucleotide"
  modified_base (1)..(1): GalNAc-morpholino-thymidine analog 3
  modified_base (2)..(2): GalNAc-morpholino-thymidine analog 3
  modified_base (3)..(3): GalNAc-morpholino-thymidine analog 3
  modified_base (4)..(4): 2'-OMe-nucleotide
  modified_base (5)..(5): 2'-OMe-nucleotide
  modified_base (6)..(6): 2'-OMe-nucleotide
  modified_base (7)..(7): 2'-OMe-nucleotide
  modified_base (8)..(8): 2'-fluoro-nucleotide
  modified_base (9)..(9): 2'-OMe-nucleotide
  modified_base (10)..(10): 2'-fluoro-nucleotide
  modified_base (11)..(11): 2'-fluoro-nucleotide
  modified_base (12)..(12): 2'-fluoro-nucleotide
  modified_base (13)..(13): 2'-OMe-nucleotide
  modified_base (14)..(14): 2'-OMe-nucleotide
  modified_base (15)..(15): 2'-OMe-nucleotide
  modified_base (16)..(16): 2'-OMe-nucleotide
  modified_base (17)..(17): 2'-OMe-nucleotide
  modified_base (18)..(18): 2'-OMe-nucleotide
  modified_base (19)..(19): 2'-OMe-nucleotide
  modified_base (20)..(20): 2'-OMe-nucleotide
  modified_base (21)..(21): 2'-OMe-nucleotide
  modified_base (22)..(22): 2'-OMe-nucleotide
  modified_base (23)..(23): Locked nucleic acid (LNA) nucleotide
  modified_base (24)..(24): Locked nucleic acid (LNA) nucleotide
tttgaguuaucaaggcacauactt

SEQ ID NO: 1273 - DNA, 24 bp, Artificial Sequence
  source: /note="Description of Artificial Sequence: Synthetic oligonucleotide"
  source: /note="Description of Combined DNA/RNA Molecule: Synthetic oligonucleotide"
  modified_base (1)..(1): GalNAc-morpholino-thymidine analog 3
  modified_base (2)..(2): GalNAc-morpholino-thymidine analog 3
  modified_base (3)..(3): GalNAc-morpholino-thymidine analog 3
  modified_base (4)..(4): 2'-OMe-nucleotide
  modified_base (5)..(5): 2'-OMe-nucleotide
  modified_base (6)..(6): 2'-OMe-nucleotide
  modified_base (7)..(7): 2'-OMe-nucleotide
  modified_base (8)..(8): 2'-fluoro-nucleotide
  modified_base (9)..(9): 2'-OMe-nucleotide
  modified_base (10)..(10): 2'-fluoro-nucleotide
  modified_base (11)..(11): 2'-fluoro-nucleotide
  modified_base (12)..(12): 2'-fluoro-nucleotide
  modified_base (13)..(13): 2'-OMe-nucleotide
  modified_base (14)..(14): 2'-OMe-nucleotide
  modified_base (15)..(15): 2'-OMe-nucleotide
  modified_base (16)..(16): 2'-OMe-nucleotide
  modified_base (17)..(17): 2'-OMe-nucleotide
  modified_base (18)..(18): 2'-OMe-nucleotide
  modified_base (19)..(19): 2'-OMe-nucleotide
  modified_base (20)..(20): 2'-OMe-nucleotide
  modified_base (21)..(21): 2'-OMe-nucleotide
  modified_base (22)..(22): 2'-OMe-nucleotide
  modified_base (23)..(23): Locked nucleic acid (LNA) nucleotide
  modified_base (24)..(24): Locked nucleic acid (LNA) nucleotide
tttgaguuaucaaggcacauactt

SEQ ID NO: 1274 - DNA, 24 bp, Artificial Sequence
  source: /note="Description of Artificial Sequence: Synthetic oligonucleotide"
  source: /note="Description of Combined DNA/RNA Molecule: Synthetic oligonucleotide"
  modified_base (1)..(1): GalNAc-morpholino-thymidine analog 3
  modified_base (2)..(2): GalNAc-morpholino-thymidine analog 3
  modified_base (3)..(3): GalNAc-morpholino-thymidine analog 3
  modified_base (4)..(4): 2'-OMe-nucleotide
  modified_base (5)..(5): 2'-OMe-nucleotide
  modified_base (6)..(6): 2'-OMe-nucleotide
  modified_base (7)..(7): 2'-OMe-nucleotide
  modified_base (8)..(8): 2'-fluoro-nucleotide
  modified_base (9)..(9): 2'-OMe-nucleotide
  modified_base (10)..(10): 2'-fluoro-nucleotide
  modified_base (11)..(11): 2'-fluoro-nucleotide
  modified_base (12)..(12): 2'-fluoro-nucleotide
  modified_base (13)..(13): 2'-OMe-nucleotide
  modified_base (14)..(14): 2'-OMe-nucleotide
  modified_base (15)..(15): 2'-OMe-nucleotide
  modified_base (16)..(16): 2'-OMe-nucleotide
  modified_base (17)..(17): 2'-OMe-nucleotide
  modified_base (18)..(18): 2'-OMe-nucleotide
  modified_base (19)..(19): 2'-OMe-nucleotide
  modified_base (20)..(20): 2'-OMe-nucleotide
  modified_base (21)..(21): 2'-OMe-nucleotide
  modified_base (22)..(22): 2'-OMe-nucleotide
  modified_base (23)..(23): Locked nucleic acid (LNA) nucleotide
  modified_base (24)..(24): Locked nucleic acid (LNA) nucleotide
tttgaguuaucaaggcacauactt

SEQ ID NO: 1275 - DNA, 24 bp, Artificial Sequence
  source: /note="Description of Artificial Sequence: Synthetic oligonucleotide"
  source: /note="Description of Combined DNA/RNA Molecule: Synthetic oligonucleotide"
  modified_base (1)..(1): GalNAc-morpholino-thymidine analog 3
  modified_base (2)..(2): GalNAc-morpholino-thymidine analog 3
  modified_base (3)..(3): GalNAc-morpholino-thymidine analog 3
  modified_base (4)..(4): 2'-OMe-nucleotide
  modified_base (5)..(5): 2'-OMe-nucleotide
  modified_base (6)..(6): 2'-OMe-nucleotide
  modified_base (7)..(7): 2'-OMe-nucleotide
  modified_base (8)..(8): 2'-fluoro-nucleotide
  modified_base (9)..(9): 2'-OMe-nucleotide
  modified_base (10)..(10): 2'-fluoro-nucleotide
  modified_base (11)..(11): 2'-fluoro-nucleotide
  modified_base (12)..(12): 2'-fluoro-nucleotide
  modified_base (13)..(13): 2'-OMe-nucleotide
  modified_base (14)..(14): 2'-OMe-nucleotide
  modified_base (15)..(15): 2'-OMe-nucleotide
  modified_base (16)..(16): 2'-OMe-nucleotide
  modified_base (17)..(17): 2'-OMe-nucleotide
  modified_base (18)..(18): 2'-OMe-nucleotide
  modified_base (19)..(19): 2'-OMe-nucleotide
  modified_base (20)..(20): 2'-OMe-nucleotide
  modified_base (21)..(21): 2'-OMe-nucleotide
  modified_base (22)..(22): 2'-OMe-nucleotide
  modified_base (23)..(23): Locked nucleic acid (LNA) nucleotide
  modified_base (24)..(24): Locked nucleic acid (LNA) nucleotide
tttgaguuaucaaggcacauactt

SEQ ID NO: 1276 - DNA, 24 bp, Artificial Sequence
  source: /note="Description of Artificial Sequence: Synthetic oligonucleotide"
  source: /note="Description of Combined DNA/RNA Molecule: Synthetic oligonucleotide"
  modified_base (1)..(1): GalNAc-morpholino-thymidine analog 3
  modified_base (2)..(2): GalNAc-morpholino-thymidine analog 3
  modified_base (3)..(3): GalNAc-morpholino-thymidine analog 3
  modified_base (4)..(4): 2'-OMe-nucleotide
  modified_base (5)..(5): 2'-OMe-nucleotide
  modified_base (6)..(6): 2'-OMe-nucleotide
  modified_base (7)..(7): 2'-OMe-nucleotide
  modified_base (8)..(8): 2'-fluoro-nucleotide
  modified_base (9)..(9): 2'-OMe-nucleotide
  modified_base (10)..(10): 2'-fluoro-nucleotide
  modified_base (11)..(11): 2'-fluoro-nucleotide
  modified_base (12)..(12): 2'-fluoro-nucleotide
  modified_base (13)..(13): 2'-OMe-nucleotide
  modified_base (14)..(14): 2'-OMe-nucleotide
  modified_base (15)..(15): 2'-OMe-nucleotide
  modified_base (16)..(16): 2'-OMe-nucleotide
  modified_base (17)..(17): 2'-OMe-nucleotide
  modified_base (18)..(18): 2'-OMe-nucleotide
  modified_base (19)..(19): 2'-OMe-nucleotide
  modified_base (20)..(20): 2'-OMe-nucleotide
  modified_base (21)..(21): 2'-OMe-nucleotide
  modified_base (22)..(22): 2'-OMe-nucleotide
  modified_base (23)..(23): Locked nucleic acid (LNA) nucleotide
  modified_base (24)..(24): Locked nucleic acid (LNA) nucleotide
tttgaguuaucaaggcacauactt

SEQ ID NO: 1277 - DNA, 24 bp, Artificial Sequence
  source: /note="Description of Artificial Sequence: Synthetic oligonucleotide"
  source: /note="Description of Combined DNA/RNA Molecule: Synthetic oligonucleotide"
  modified_base (1)..(1): GalNAc-morpholino-thymidine analog 3
  modified_base (2)..(2): GalNAc-morpholino-thymidine analog 3
  modified_base (3)..(3): GalNAc-morpholino-thymidine analog 3
  modified_base (4)..(4): 2'-OMe-nucleotide
  modified_base (5)..(5): 2'-OMe-nucleotide
  modified_base (6)..(6): 2'-OMe-nucleotide
  modified_base (7)..(7): 2'-OMe-nucleotide
  modified_base (8)..(8): 2'-fluoro-nucleotide
  modified_base (9)..(9): 2'-OMe-nucleotide
  modified_base (10)..(10): 2'-fluoro-nucleotide
  modified_base (11)..(11): 2'-fluoro-nucleotide
  modified_base (12)..(12): 2'-fluoro-nucleotide
  modified_base (13)..(13): 2'-OMe-nucleotide
  modified_base (14)..(14): 2'-OMe-nucleotide
  modified_base (15)..(15): 2'-OMe-nucleotide
  modified_base (16)..(16): 2'-OMe-nucleotide
  modified_base (17)..(17): 2'-OMe-nucleotide
  modified_base (18)..(18): 2'-OMe-nucleotide
  modified_base (19)..(19): 2'-OMe-nucleotide
  modified_base (20)..(20): 2'-OMe-nucleotide
  modified_base (21)..(21): 2'-OMe-nucleotide
  modified_base (22)..(22): 2'-OMe-nucleotide
  modified_base (23)..(23): Locked nucleic acid (LNA) nucleotide
  modified_base (24)..(24): Locked nucleic acid (LNA) nucleotide
tttgaguuaucaaggcacauactt

SEQ ID NO: 1278 - DNA, 24 bp, Artificial Sequence
  source: /note="Description of Artificial Sequence: Synthetic oligonucleotide"
  source: /note="Description of Combined DNA/RNA Molecule: Synthetic oligonucleotide"
  modified_base (1)..(1): GalNAc-morpholino-thymidine analog 3
  misc_feature (1)..(2): /note="phosphorothioate bond"
  modified_base (2)..(2): GalNAc-morpholino-thymidine analog 3
  misc_feature (2)..(3): /note="phosphorothioate bond"
  modified_base (3)..(3): GalNAc-morpholino-thymidine analog 3
  modified_base (4)..(4): 2'-OMe-nucleotide
  modified_base (5)..(5): 2'-OMe-nucleotide
  modified_base (6)..(6): 2'-OMe-nucleotide
  modified_base (7)..(7): 2'-OMe-nucleotide
  modified_base (8)..(8): 2'-fluoro-nucleotide
  modified_base (9)..(9): 2'-OMe-nucleotide
  modified_base (10)..(10): 2'-fluoro-nucleotide
  modified_base (11)..(11): 2'-fluoro-nucleotide
  modified_base (12)..(12): 2'-fluoro-nucleotide
  modified_base (13)..(13): 2'-OMe-nucleotide
  modified_base (14)..(14): 2'-OMe-nucleotide
  modified_base (15)..(15): 2'-OMe-nucleotide
  modified_base (16)..(16): 2'-OMe-nucleotide
  modified_base (17)..(17): 2'-OMe-nucleotide
  modified_base (18)..(18): 2'-OMe-nucleotide
  modified_base (19)..(19): 2'-OMe-nucleotide
  modified_base (20)..(20): 2'-OMe-nucleotide
  modified_base (21)..(21): 2'-OMe-nucleotide
  modified_base (22)..(22): 2'-OMe-nucleotide
  misc_feature (22)..(23): /note="phosphorothioate bond"
  modified_base (23)..(23): Locked nucleic acid (LNA) nucleotide
  misc_feature (23)..(24): /note="phosphorothioate bond"
  modified_base (24)..(24): Locked nucleic acid (LNA) nucleotide
tttgaguuaucaaggcacauactt

SEQ ID NO: 1279 - DNA, 24 bp, Artificial Sequence
  source: /note="Description of Artificial Sequence: Synthetic oligonucleotide"
  source: /note="Description of Combined DNA/RNA Molecule: Synthetic oligonucleotide"
  modified_base (1)..(1): GalNAc-morpholino-thymidine analog 3
  misc_feature (1)..(2): /note="phosphorothioate bond"
  modified_base (2)..(2): GalNAc-morpholino-thymidine analog 3
  misc_feature (2)..(3): /note="phosphorothioate bond"
  modified_base (3)..(3): GalNAc-morpholino-thymidine analog 3
  modified_base (4)..(4): 2'-OMe-nucleotide
  modified_base (5)..(5): 2'-OMe-nucleotide
  modified_base (6)..(6): 2'-OMe-nucleotide
  modified_base (7)..(7): 2'-OMe-nucleotide
  modified_base (8)..(8): 2'-fluoro-nucleotide
  modified_base (9)..(9): 2'-OMe-nucleotide
  modified_base (10)..(10): 2'-fluoro-nucleotide
  modified_base (11)..(11): 2'-fluoro-nucleotide
  modified_base (12)..(12): 2'-fluoro-nucleotide
  modified_base (13)..(13): 2'-OMe-nucleotide
  modified_base (14)..(14): 2'-OMe-nucleotide
  modified_base (15)..(15): 2'-OMe-nucleotide
  modified_base (16)..(16): 2'-OMe-nucleotide
  modified_base (17)..(17): 2'-OMe-nucleotide
  modified_base (18)..(18): 2'-OMe-nucleotide
  modified_base (19)..(19): 2'-OMe-nucleotide
  modified_base (20)..(20): 2'-OMe-nucleotide
  modified_base (21)..(21): 2'-OMe-nucleotide
  modified_base (22)..(22): 2'-OMe-nucleotide
  misc_feature (22)..(23): /note="phosphorothioate bond"
  modified_base (23)..(23): Locked nucleic acid (LNA) nucleotide
  misc_feature (23)..(24): /note="phosphorothioate bond"
  modified_base (24)..(24): Locked nucleic acid (LNA) nucleotide
tttgaguuaucaaggcacauactt

SEQ ID NO: 1280 - DNA, 24 bp, Artificial Sequence
  source: /note="Description of Artificial Sequence: Synthetic oligonucleotide"
  source: /note="Description of Combined DNA/RNA Molecule: Synthetic oligonucleotide"
  modified_base (1)..(1): GalNAc-morpholino-thymidine analog 3
  misc_feature (1)..(2): /note="phosphorothioate bond"
  modified_base (2)..(2): GalNAc-morpholino-thymidine analog 3
  misc_feature (2)..(3): /note="phosphorothioate bond"
  modified_base (3)..(3): GalNAc-morpholino-thymidine analog 3
  modified_base (4)..(4): 2'-OMe-nucleotide
  modified_base (5)..(5): 2'-OMe-nucleotide
  modified_base (6)..(6): 2'-OMe-nucleotide
  modified_base (7)..(7): 2'-OMe-nucleotide
  modified_base (8)..(8): 2'-fluoro-nucleotide
  modified_base (9)..(9): 2'-OMe-nucleotide
  modified_base (10)..(10): 2'-fluoro-nucleotide
  modified_base (11)..(11): 2'-fluoro-nucleotide
  modified_base (12)..(12): 2'-fluoro-nucleotide
  modified_base (13)..(13): 2'-OMe-nucleotide
  modified_base (14)..(14): 2'-OMe-nucleotide
  modified_base (15)..(15): 2'-OMe-nucleotide
  modified_base (16)..(16): 2'-OMe-nucleotide
  modified_base (17)..(17): 2'-OMe-nucleotide
  modified_base (18)..(18): 2'-OMe-nucleotide
  modified_base (19)..(19): 2'-OMe-nucleotide
  modified_base (20)..(20): 2'-OMe-nucleotide
  modified_base (21)..(21): 2'-OMe-nucleotide
  modified_base (22)..(22): 2'-OMe-nucleotide
  misc_feature (22)..(23): /note="phosphorothioate bond"
  modified_base (23)..(23): Locked nucleic acid (LNA) nucleotide
  misc_feature (23)..(24): /note="phosphorothioate bond"
  modified_base (24)..(24): Locked nucleic acid (LNA) nucleotide
tttgaguuaucaaggcacauactt

SEQ ID NO: 1281 - DNA, 24 bp, Artificial Sequence
  source: /note="Description of Artificial Sequence: Synthetic oligonucleotide"
  source: /note="Description of Combined DNA/RNA Molecule: Synthetic oligonucleotide"
  modified_base (1)..(1): GalNAc-morpholino-thymidine analog 3
  misc_feature (1)..(2): /note="phosphorothioate bond"
  modified_base (2)..(2): GalNAc-morpholino-thymidine analog 3
  misc_feature (2)..(3): /note="phosphorothioate bond"
  modified_base (3)..(3): GalNAc-morpholino-thymidine analog 3
  modified_base (4)..(4): 2'-OMe-nucleotide
  modified_base (5)..(5): 2'-OMe-nucleotide
  modified_base (6)..(6): 2'-OMe-nucleotide
  modified_base (7)..(7): 2'-OMe-nucleotide
  modified_base (8)..(8): 2'-fluoro-nucleotide
  modified_base (9)..(9): 2'-OMe-nucleotide
  modified_base (10)..(10): 2'-fluoro-nucleotide
  modified_base (11)..(11): 2'-fluoro-nucleotide
  modified_base (12)..(12): 2'-fluoro-nucleotide
  modified_base (13)..(13): 2'-OMe-nucleotide
  modified_base (14)..(14): 2'-OMe-nucleotide
  modified_base (15)..(15): 2'-OMe-nucleotide
  modified_base (16)..(16): 2'-OMe-nucleotide
  modified_base (17)..(17): 2'-OMe-nucleotide
  modified_base (18)..(18): 2'-OMe-nucleotide
  modified_base (19)..(19): 2'-OMe-nucleotide
  modified_base (20)..(20): 2'-OMe-nucleotide
  modified_base (21)..(21): 2'-OMe-nucleotide
  modified_base (22)..(22): 2'-OMe-nucleotide
  misc_feature (22)..(23): /note="phosphorothioate bond"
  modified_base (23)..(23): Locked nucleic acid (LNA) nucleotide
  misc_feature (23)..(24): /note="phosphorothioate bond"
  modified_base (24)..(24): Locked nucleic acid (LNA) nucleotide
tttgaguuaucaaggcacauactt

SEQ ID NO: 1282 - DNA, 24 bp, Artificial Sequence
  source: /note="Description of Artificial Sequence: Synthetic oligonucleotide"
  source: /note="Description of Combined DNA/RNA Molecule: Synthetic oligonucleotide"
  modified_base (1)..(1): GalNAc-morpholino-thymidine analog 3
  misc_feature (1)..(2): /note="phosphorothioate bond"
  modified_base (2)..(2): GalNAc-morpholino-thymidine analog 3
  misc_feature (2)..(3): /note="phosphorothioate bond"
  modified_base (3)..(3): GalNAc-morpholino-thymidine analog 3
  modified_base (4)..(4): 2'-OMe-nucleotide
  modified_base (5)..(5): 2'-OMe-nucleotide
  modified_base (6)..(6): 2'-OMe-nucleotide
  modified_base (7)..(7): 2'-OMe-nucleotide
  modified_base (8)..(8): 2'-fluoro-nucleotide
  modified_base (9)..(9): 2'-OMe-nucleotide
  modified_base (10)..(10): 2'-fluoro-nucleotide
  modified_base (11)..(11): 2'-fluoro-nucleotide
  modified_base (12)..(12): 2'-fluoro-nucleotide
  modified_base (13)..(13): 2'-OMe-nucleotide
  modified_base (14)..(14): 2'-OMe-nucleotide
  modified_base (15)..(15): 2'-OMe-nucleotide
  modified_base (16)..(16): 2'-OMe-nucleotide
  modified_base (17)..(17): 2'-OMe-nucleotide
  modified_base (18)..(18): 2'-OMe-nucleotide
  modified_base (19)..(19): 2'-OMe-nucleotide
  modified_base (20)..(20): 2'-OMe-nucleotide
  modified_base (21)..(21): 2'-OMe-nucleotide
  modified_base (22)..(22): 2'-OMe-nucleotide
  misc_feature (22)..(23): /note="phosphorothioate bond"
  modified_base (23)..(23): Locked nucleic acid (LNA) nucleotide
  misc_feature (23)..(24): /note="phosphorothioate bond"
  modified_base (24)..(24): Locked nucleic acid (LNA) nucleotide
tttgaguuaucaaggcacauactt

SEQ ID NO: 1283 - DNA, 24 bp, Artificial Sequence
  source: /note="Description of Artificial Sequence: Synthetic oligonucleotide"
  source: /note="Description of Combined DNA/RNA Molecule: Synthetic oligonucleotide"
  modified_base (1)..(1): GalNAc-morpholino-thymidine analog 3
  misc_feature (1)..(2): /note="phosphorothioate bond"
  modified_base (2)..(2): GalNAc-morpholino-thymidine analog 3
  misc_feature (2)..(3): /note="phosphorothioate bond"
  modified_base (3)..(3): GalNAc-morpholino-thymidine analog 3
  modified_base (4)..(4): 2'-OMe-nucleotide
  modified_base (5)..(5): 2'-OMe-nucleotide
  modified_base (6)..(6): 2'-OMe-nucleotide
  modified_base (7)..(7): 2'-OMe-nucleotide
  modified_base (8)..(8): 2'-fluoro-nucleotide
  modified_base (9)..(9): 2'-OMe-nucleotide
  modified_base (10)..(10): 2'-fluoro-nucleotide
  modified_base (11)..(11): 2'-fluoro-nucleotide
  modified_base (12)..(12): 2'-fluoro-nucleotide
  modified_base (13)..(13): 2'-OMe-nucleotide
  modified_base (14)..(14): 2'-OMe-nucleotide
  modified_base (15)..(15): 2'-OMe-nucleotide
  modified_base (16)..(16): 2'-OMe-nucleotide
  modified_base (17)..(17): 2'-OMe-nucleotide
  modified_base (18)..(18): 2'-OMe-nucleotide
  modified_base (19)..(19): 2'-OMe-nucleotide
  modified_base (20)..(20): 2'-OMe-nucleotide
  modified_base (21)..(21): 2'-OMe-nucleotide
  modified_base (22)..(22): 2'-OMe-nucleotide
  misc_feature (22)..(23): /note="phosphorothioate bond"
  modified_base (23)..(23): Locked nucleic acid (LNA) nucleotide
  misc_feature (23)..(24): /note="phosphorothioate bond"
  modified_base (24)..(24): Locked nucleic acid (LNA) nucleotide
tttgaguuaucaaggcacauactt

SEQ ID NO: 1284 - DNA, 24 bp, Artificial Sequence
  source: /note="Description of Artificial Sequence: Synthetic oligonucleotide"
  source: /note="Description of Combined DNA/RNA Molecule: Synthetic oligonucleotide"
  modified_base (1)..(1): GalNAc-morpholino-thymidine analog 3
  misc_feature (1)..(2): /note="phosphorothioate bond"
  modified_base (2)..(2): GalNAc-morpholino-thymidine analog 3
  misc_feature (2)..(3): /note="phosphorothioate bond"
  modified_base (3)..(3): GalNAc-morpholino-thymidine analog 3
  modified_base (4)..(4): 2'-OMe-nucleotide
  modified_base (5)..(5): 2'-OMe-nucleotide
  modified_base (6)..(6): 2'-OMe-nucleotide
  modified_base (7)..(7): 2'-OMe-nucleotide
  modified_base (8)..(8): 2'-fluoro-nucleotide
  modified_base (9)..(9): 2'-OMe-nucleotide
  modified_base (10)..(10): 2'-fluoro-nucleotide
  modified_base (11)..(11): 2'-fluoro-nucleotide
  modified_base (12)..(12): 2'-fluoro-nucleotide
  modified_base (13)..(13): 2'-OMe-nucleotide
  modified_base (14)..(14): 2'-OMe-nucleotide
  modified_base (15)..(15): 2'-OMe-nucleotide
  modified_base (16)..(16): 2'-OMe-nucleotide
  modified_base (17)..(17): 2'-OMe-nucleotide
  modified_base (18)..(18): 2'-OMe-nucleotide
  modified_base (19)..(19): 2'-OMe-nucleotide
  modified_base (20)..(20): 2'-OMe-nucleotide
  modified_base (21)..(21): 2'-OMe-nucleotide
  modified_base (22)..(22): 2'-OMe-nucleotide
  misc_feature (22)..(23): /note="phosphorothioate bond"
  modified_base (23)..(23): Locked nucleic acid (LNA) nucleotide
  misc_feature (23)..(24): /note="phosphorothioate bond"
  modified_base (24)..(24): Locked nucleic acid (LNA) nucleotide
tttgaguuaucaaggcacauactt

SEQ ID NO: 1285 - DNA, 24 bp, Artificial Sequence
  source: /note="Description of Artificial Sequence: Synthetic oligonucleotide"
  source: /note="Description of Combined DNA/RNA Molecule: Synthetic oligonucleotide"
  modified_base (1)..(1): GalNAc-morpholino-thymidine analog 3
  misc_feature (1)..(2): /note="phosphorothioate bond"
  modified_base (2)..(2): GalNAc-morpholino-thymidine analog 3
  misc_feature (2)..(3): /note="phosphorothioate bond"
  modified_base (3)..(3): GalNAc-morpholino-thymidine analog 3
  modified_base (4)..(4): 2'-OMe-nucleotide
  modified_base (5)..(5): 2'-OMe-nucleotide
  modified_base (6)..(6): 2'-OMe-nucleotide
  modified_base (7)..(7): 2'-OMe-nucleotide
  modified_base (8)..(8): 2'-fluoro-nucleotide
  modified_base (9)..(9): 2'-OMe-nucleotide
  modified_base (10)..(10): 2'-fluoro-nucleotide
  modified_base (11)..(11): 2'-fluoro-nucleotide
  modified_base (12)..(12): 2'-fluoro-nucleotide
  modified_base (13)..(13): 2'-OMe-nucleotide
  modified_base (14)..(14): 2'-OMe-nucleotide
  modified_base (15)..(15): 2'-OMe-nucleotide
  modified_base (16)..(16): 2'-OMe-nucleotide
  modified_base (17)..(17): 2'-OMe-nucleotide
  modified_base (18)..(18): 2'-OMe-nucleotide
  modified_base (19)..(19): 2'-OMe-nucleotide
  modified_base (20)..(20): 2'-OMe-nucleotide
  modified_base (21)..(21): 2'-OMe-nucleotide
  modified_base (22)..(22): 2'-OMe-nucleotide
  misc_feature (22)..(23): /note="phosphorothioate bond"
  modified_base (23)..(23): Locked nucleic acid (LNA) nucleotide
  misc_feature (23)..(24): /note="phosphorothioate bond"
  modified_base (24)..(24): Locked nucleic acid (LNA) nucleotide
tttgaguuaucaaggcacauactt

SEQ ID NO: 1286 - DNA, 24 bp, Artificial Sequence
  source: /note="Description of Artificial Sequence: Synthetic oligonucleotide"
  source: /note="Description of Combined DNA/RNA Molecule: Synthetic oligonucleotide"
  modified_base (1)..(1): GalNAc-morpholino-thymidine analog 3
  misc_feature (1)..(2): /note="phosphorothioate bond"
  modified_base (2)..(2): GalNAc-morpholino-thymidine analog 3
  misc_feature (2)..(3): /note="phosphorothioate bond"
  modified_base (3)..(3): GalNAc-morpholino-thymidine analog 3
  modified_base (4)..(4): 2'-OMe-nucleotide
  modified_base (5)..(5): 2'-OMe-nucleotide
  modified_base (6)..(6): 2'-OMe-nucleotide
  modified_base (7)..(7): 2'-OMe-nucleotide
  modified_base (8)..(8): 2'-fluoro-nucleotide
  modified_base (9)..(9): 2'-OMe-nucleotide
  modified_base (10)..(10): 2'-fluoro-nucleotide
  modified_base (11)..(11): 2'-fluoro-nucleotide
  modified_base (12)..(12): 2'-fluoro-nucleotide
  modified_base (13)..(13): 2'-OMe-nucleotide
  modified_base (14)..(14): 2'-OMe-nucleotide
  modified_base (15)..(15): 2'-OMe-nucleotide
  modified_base (16)..(16): 2'-OMe-nucleotide
  modified_base (17)..(17): 2'-OMe-nucleotide
  modified_base (18)..(18): 2'-OMe-nucleotide
  modified_base (19)..(19): 2'-OMe-nucleotide
  modified_base (20)..(20): 2'-OMe-nucleotide
  modified_base (21)..(21): 2'-OMe-nucleotide
  modified_base (22)..(22): 2'-OMe-nucleotide
  misc_feature (22)..(23): /note="phosphorothioate bond"
  modified_base (23)..(23): Locked nucleic acid (LNA) nucleotide
  misc_feature (23)..(24): /note="phosphorothioate bond"
  modified_base (24)..(24): Locked nucleic acid (LNA) nucleotide
tttgaguuaucaaggcacauactt

SEQ ID NO: 1287 - DNA, 24 bp, Artificial Sequence
  source: /note="Description of Artificial Sequence: Synthetic oligonucleotide"
  source: /note="Description of Combined DNA/RNA Molecule: Synthetic oligonucleotide"
  modified_base (1)..(1): GalNAc-morpholino-thymidine analog 3
  modified_base (2)..(2): GalNAc-morpholino-thymidine analog 3
  modified_base (3)..(3): GalNAc-morpholino-thymidine analog 3
  modified_base (4)..(4): Locked nucleic acid (LNA) nucleotide
  modified_base (5)..(5): Locked nucleic acid (LNA) nucleotide
  modified_base (6)..(6): 2'-OMe-nucleotide
  modified_base (7)..(7): 2'-OMe-nucleotide
  modified_base (8)..(8): 2'-fluoro-nucleotide
  modified_base (9)..(9): 2'-OMe-nucleotide
  modified_base (10)..(10): 2'-fluoro-nucleotide
  modified_base (11)..(11): 2'-fluoro-nucleotide
  modified_base (12)..(12): 2'-fluoro-nucleotide
  modified_base (13)..(13): 2'-OMe-nucleotide
  modified_base (14)..(14): 2'-OMe-nucleotide
  modified_base (15)..(15): 2'-OMe-nucleotide
  modified_base (16)..(16): 2'-OMe-nucleotide
  modified_base (17)..(17): 2'-OMe-nucleotide
  modified_base (18)..(18): 2'-OMe-nucleotide
  modified_base (19)..(19): 2'-OMe-nucleotide
  modified_base (20)..(20): 2'-OMe-nucleotide
  modified_base (21)..(21): 2'-OMe-nucleotide
  modified_base (22)..(22): 2'-OMe-nucleotide
  modified_base (23)..(23): Locked nucleic acid (LNA) nucleotide
  modified_base (24)..(24): Locked nucleic acid (LNA) nucleotide
tttgaguuaucaaggcacauactt

SEQ ID NO: 1288 - DNA, 24 bp, Artificial Sequence
  source: /note="Description of Artificial Sequence: Synthetic oligonucleotide"
  source: /note="Description of Combined DNA/RNA Molecule: Synthetic oligonucleotide"
  modified_base (1)..(1): GalNAc-morpholino-thymidine analog 3
  modified_base (2)..(2): GalNAc-morpholino-thymidine analog 3
  modified_base (3)..(3): GalNAc-morpholino-thymidine analog 3
  modified_base (4)..(4): Locked nucleic acid (LNA) nucleotide
  modified_base (5)..(5): Locked nucleic acid (LNA) nucleotide
  modified_base (6)..(6): 2'-OMe-nucleotide
  modified_base (7)..(7): 2'-OMe-nucleotide
  modified_base (8)..(8): 2'-fluoro-nucleotide
  modified_base (9)..(9): 2'-OMe-nucleotide
  modified_base (10)..(10): 2'-fluoro-nucleotide
  modified_base (11)..(11): 2'-fluoro-nucleotide
  modified_base (12)..(12): 2'-fluoro-nucleotide
  modified_base (13)..(13): 2'-OMe-nucleotide
  modified_base (14)..(14): 2'-OMe-nucleotide
  modified_base (15)..(15): 2'-OMe-nucleotide
  modified_base (16)..(16): 2'-OMe-nucleotide
  modified_base (17)..(17): 2'-OMe-nucleotide
  modified_base (18)..(18): 2'-OMe-nucleotide
  modified_base (19)..(19): 2'-OMe-nucleotide
  modified_base (20)..(20): 2'-OMe-nucleotide
  modified_base (21)..(21): 2'-OMe-nucleotide
  modified_base (22)..(22): 2'-OMe-nucleotide
  modified_base (23)..(23): Locked nucleic acid (LNA) nucleotide
  modified_base (24)..(24): Locked nucleic acid (LNA) nucleotide
tttgaguuaucaaggcacauactt

SEQ ID NO: 1289 - DNA, 24 bp, Artificial Sequence
  source: /note="Description of Artificial Sequence: Synthetic oligonucleotide"
  source: /note="Description of Combined DNA/RNA Molecule: Synthetic oligonucleotide"
  modified_base (1)..(1): GalNAc-morpholino-thymidine analog 3
  modified_base (2)..(2): GalNAc-morpholino-thymidine analog 3
  modified_base (3)..(3): GalNAc-morpholino-thymidine analog 3
  modified_base (4)..(4): Locked nucleic acid (LNA) nucleotide
  modified_base (5)..(5): Locked nucleic acid (LNA) nucleotide
  modified_base (6)..(6): 2'-OMe-nucleotide
  modified_base (7)..(7): 2'-OMe-nucleotide
  modified_base (8)..(8): 2'-fluoro-nucleotide
  modified_base (9)..(9): 2'-OMe-nucleotide
  modified_base (10)..(10): 2'-fluoro-nucleotide
  modified_base (11)..(11): 2'-fluoro-nucleotide
  modified_base (12)..(12): 2'-fluoro-nucleotide
  modified_base (13)..(13): 2'-OMe-nucleotide
  modified_base (14)..(14): 2'-OMe-nucleotide
  modified_base (15)..(15): 2'-OMe-nucleotide
  modified_base (16)..(16): 2'-OMe-nucleotide
  modified_base (17)..(17): 2'-OMe-nucleotide
  modified_base (18)..(18): 2'-OMe-nucleotide
  modified_base (19)..(19): 2'-OMe-nucleotide
  modified_base (20)..(20): 2'-OMe-nucleotide
  modified_base (21)..(21): 2'-OMe-nucleotide
  modified_base (22)..(22): 2'-OMe-nucleotide
  modified_base (23)..(23): Locked nucleic acid (LNA) nucleotide
  modified_base (24)..(24): Locked nucleic acid (LNA) nucleotide
tttgaguuaucaaggcacauactt

SEQ ID NO: 1290 - DNA, 24 bp, Artificial Sequence
  source: /note="Description of Artificial Sequence: Synthetic oligonucleotide"
  source: /note="Description of Combined DNA/RNA Molecule: Synthetic oligonucleotide"
  modified_base (1)..(1): GalNAc-morpholino-thymidine analog 3
  modified_base (2)..(2): GalNAc-morpholino-thymidine analog 3
  modified_base (3)..(3): GalNAc-morpholino-thymidine analog 3
  modified_base (4)..(4): Locked nucleic acid (LNA) nucleotide
  modified_base (5)..(5): Locked nucleic acid (LNA) nucleotide
  modified_base (6)..(6): 2'-OMe-nucleotide
  modified_base (7)..(7): 2'-OMe-nucleotide
  modified_base (8)..(8): 2'-fluoro-nucleotide
  modified_base (9)..(9): 2'-OMe-nucleotide
  modified_base (10)..(10): 2'-fluoro-nucleotide
  modified_base (11)..(11): 2'-fluoro-nucleotide
  modified_base (12)..(12): 2'-fluoro-nucleotide
  modified_base (13)..(13): 2'-OMe-nucleotide
  modified_base (14)..(14): 2'-OMe-nucleotide
  modified_base (15)..(15): 2'-OMe-nucleotide
  modified_base (16)..(16): 2'-OMe-nucleotide
  modified_base (17)..(17): 2'-OMe-nucleotide
  modified_base (18)..(18): 2'-OMe-nucleotide
  modified_base (19)..(19): 2'-OMe-nucleotide
  modified_base (20)..(20): 2'-OMe-nucleotide
  modified_base (21)..(21): 2'-OMe-nucleotide
  modified_base (22)..(22): 2'-OMe-nucleotide
  modified_base (23)..(23): Locked nucleic acid (LNA) nucleotide
  modified_base (24)..(24): Locked nucleic acid (LNA) nucleotide
tttgaguuaucaaggcacauactt

SEQ ID NO: 1291 - DNA, 24 bp, Artificial Sequence
  source: /note="Description of Artificial Sequence: Synthetic oligonucleotide"
  source: /note="Description of Combined DNA/RNA Molecule: Synthetic oligonucleotide"
  modified_base (1)..(1): GalNAc-morpholino-thymidine analog 3
  modified_base (2)..(2): GalNAc-morpholino-thymidine analog 3
  modified_base (3)..(3): GalNAc-morpholino-thymidine analog 3
  modified_base (4)..(4): Locked nucleic acid (LNA) nucleotide
  modified_base (5)..(5): Locked nucleic acid (LNA) nucleotide
  modified_base (6)..(6): 2'-OMe-nucleotide
  modified_base (7)..(7): 2'-OMe-nucleotide
  modified_base (8)..(8): 2'-fluoro-nucleotide
  modified_base (9)..(9): 2'-OMe-nucleotide
  modified_base (10)..(10): 2'-fluoro-nucleotide
  modified_base (11)..(11): 2'-fluoro-nucleotide
  modified_base (12)..(12): 2'-fluoro-nucleotide
  modified_base (13)..(13): 2'-OMe-nucleotide
  modified_base (14)..(14): 2'-OMe-nucleotide
  modified_base (15)..(15): 2'-OMe-nucleotide
  modified_base (16)..(16): 2'-OMe-nucleotide
  modified_base (17)..(17): 2'-OMe-nucleotide
  modified_base (18)..(18): 2'-OMe-nucleotide
  modified_base (19)..(19): 2'-OMe-nucleotide
  modified_base (20)..(20): 2'-OMe-nucleotide
  modified_base (21)..(21): 2'-OMe-nucleotide
  modified_base (22)..(22): 2'-OMe-nucleotide
  modified_base (23)..(23): Locked nucleic acid (LNA) nucleotide
  modified_base (24)..(24): Locked nucleic acid (LNA) nucleotide
tttgaguuaucaaggcacauactt

SEQ ID NO: 1292 - DNA, 24 bp, Artificial Sequence
  source: /note="Description of Artificial Sequence: Synthetic oligonucleotide"
  source: /note="Description of Combined DNA/RNA Molecule: Synthetic oligonucleotide"
  modified_base (1)..(1): GalNAc-morpholino-thymidine analog 3
  misc_feature (1)..(2): /note="phosphorothioate bond"
  modified_base (2)..(2): GalNAc-morpholino-thymidine analog 3
  misc_feature (2)..(3): /note="phosphorothioate bond"
  modified_base (3)..(3): GalNAc-morpholino-thymidine analog 3
  modified_base (4)..(4): Locked nucleic acid (LNA) nucleotide
  modified_base (5)..(5): Locked nucleic acid (LNA) nucleotide
  modified_base (6)..(6): 2'-OMe-nucleotide
  modified_base (7)..(7): 2'-OMe-nucleotide
  modified_base (8)..(8): 2'-fluoro-nucleotide
  modified_base (9)..(9): 2'-OMe-nucleotide
  modified_base (10)..(10): 2'-fluoro-nucleotide
  modified_base (11)..(11): 2'-fluoro-nucleotide
  modified_base (12)..(12): 2'-fluoro-nucleotide
  modified_base (13)..(13): 2'-OMe-nucleotide
  modified_base (14)..(14): 2'-OMe-nucleotide
  modified_base (15)..(15): 2'-OMe-nucleotide
  modified_base (16)..(16): 2'-OMe-nucleotide
  modified_base (17)..(17): 2'-OMe-nucleotide
  modified_base (18)..(18): 2'-OMe-nucleotide
  modified_base (19)..(19): 2'-OMe-nucleotide
  modified_base (20)..(20): 2'-OMe-nucleotide
  modified_base (21)..(21): 2'-OMe-nucleotide
  modified_base (22)..(22): 2'-OMe-nucleotide
  misc_feature (22)..(23): /note="phosphorothioate bond"
  modified_base (23)..(23): Locked nucleic acid (LNA) nucleotide
  misc_feature (23)..(24): /note="phosphorothioate bond"
  modified_base (24)..(24): Locked nucleic acid (LNA) nucleotide
tttgaguuaucaaggcacauactt

SEQ ID NO: 1293 - DNA, 24 bp, Artificial Sequence
  source: /note="Description of Artificial Sequence: Synthetic oligonucleotide"
  source: /note="Description of Combined DNA/RNA Molecule: Synthetic oligonucleotide"
  modified_base (1)..(1): GalNAc-morpholino-thymidine analog 3
  misc_feature (1)..(2): /note="phosphorothioate bond"
  modified_base (2)..(2): GalNAc-morpholino-thymidine analog 3
  misc_feature (2)..(3): /note="phosphorothioate bond"
  modified_base (3)..(3): GalNAc-morpholino-thymidine analog 3
  modified_base (4)..(4): Locked nucleic acid (LNA) nucleotide
  modified_base (5)..(5): Locked nucleic acid (LNA) nucleotide
  modified_base (6)..(6): 2'-OMe-nucleotide
  modified_base (7)..(7): 2'-OMe-nucleotide
  modified_base (8)..(8): 2'-fluoro-nucleotide
  modified_base (9)..(9): 2'-OMe-nucleotide
  modified_base (10)..(10): 2'-fluoro-nucleotide
  modified_base (11)..(11): 2'-fluoro-nucleotide
  modified_base (12)..(12): 2'-fluoro-nucleotide
  modified_base (13)..(13): 2'-OMe-nucleotide
  modified_base (14)..(14): 2'-OMe-nucleotide
  modified_base (15)..(15): 2'-OMe-nucleotide
  modified_base (16)..(16): 2'-OMe-nucleotide
  modified_base (17)..(17): 2'-OMe-nucleotide
  modified_base (18)..(18): 2'-OMe-nucleotide
  modified_base (19)..(19): 2'-OMe-nucleotide
  modified_base (20)..(20): 2'-OMe-nucleotide
  modified_base (21)..(21): 2'-OMe-nucleotide
  modified_base (22)..(22): 2'-OMe-nucleotide
  misc_feature (22)..(23): /note="phosphorothioate bond"
  modified_base (23)..(23): Locked nucleic acid (LNA) nucleotide
  misc_feature (23)..(24): /note="phosphorothioate bond"
  modified_base (24)..(24): Locked nucleic acid (LNA) nucleotide
tttgaguuaucaaggcacauactt

SEQ ID NO: 1294 - DNA, 24 bp, Artificial Sequence
  source: /note="Description of Artificial Sequence: Synthetic oligonucleotide"
  source: /note="Description of Combined DNA/RNA Molecule: Synthetic oligonucleotide"
  modified_base (1)..(1): GalNAc-morpholino-thymidine analog 3
  misc_feature (1)..(2): /note="phosphorothioate bond"
  modified_base (2)..(2): GalNAc-morpholino-thymidine analog 3
  misc_feature (2)..(3): /note="phosphorothioate bond"
  modified_base (3)..(3): GalNAc-morpholino-thymidine analog 3
  modified_base (4)..(4): Locked nucleic acid (LNA) nucleotide
  modified_base (5)..(5): Locked nucleic acid (LNA) nucleotide
  modified_base (6)..(6): 2'-OMe-nucleotide
  modified_base (7)..(7): 2'-OMe-nucleotide
  modified_base (8)..(8): 2'-fluoro-nucleotide
  modified_base (9)..(9): 2'-OMe-nucleotide
  modified_base (10)..(10): 2'-fluoro-nucleotide
  modified_base (11)..(11): 2'-fluoro-nucleotide
  modified_base (12)..(12): 2'-fluoro-nucleotide
  modified_base (13)..(13): 2'-OMe-nucleotide
  modified_base (14)..(14): 2'-OMe-nucleotide
  modified_base (15)..(15): 2'-OMe-nucleotide
  modified_base (16)..(16): 2'-OMe-nucleotide
  modified_base (17)..(17): 2'-OMe-nucleotide
  modified_base (18)..(18): 2'-OMe-nucleotide
  modified_base (19)..(19): 2'-OMe-nucleotide
  modified_base (20)..(20): 2'-OMe-nucleotide
  modified_base (21)..(21): 2'-OMe-nucleotide
  modified_base (22)..(22): 2'-OMe-nucleotide
  misc_feature (22)..(23): /note="phosphorothioate bond"
  modified_base (23)..(23): Locked nucleic acid (LNA) nucleotide
  misc_feature (23)..(24): /note="phosphorothioate bond"
  modified_base (24)..(24): Locked nucleic acid (LNA) nucleotide
tttgaguuaucaaggcacauactt

SEQ ID NO: 1295 - DNA, 24 bp, Artificial Sequence
  source: /note="Description of Artificial Sequence: Synthetic oligonucleotide"
  source: /note="Description of Combined DNA/RNA Molecule: Synthetic oligonucleotide"
  modified_base (1)..(1): GalNAc-morpholino-thymidine analog 3
  misc_feature (1)..(2): /note="phosphorothioate bond"
  modified_base (2)..(2): GalNAc-morpholino-thymidine analog 3
  misc_feature (2)..(3): /note="phosphorothioate bond"
  modified_base (3)..(3): GalNAc-morpholino-thymidine analog 3
  modified_base (4)..(4): Locked nucleic acid (LNA) nucleotide
  modified_base (5)..(5): Locked nucleic acid (LNA) nucleotide
  modified_base (6)..(6): 2'-OMe-nucleotide
  modified_base (7)..(7): 2'-OMe-nucleotide
  modified_base (8)..(8): 2'-fluoro-nucleotide
  modified_base (9)..(9): 2'-OMe-nucleotide
  modified_base (10)..(10): 2'-fluoro-nucleotide
  modified_base (11)..(11): 2'-fluoro-nucleotide
  modified_base (12)..(12): 2'-fluoro-nucleotide
  modified_base (13)..(13): 2'-OMe-nucleotide
  modified_base (14)..(14): 2'-OMe-nucleotide
  modified_base (15)..(15): 2'-OMe-nucleotide
  modified_base (16)..(16): 2'-OMe-nucleotide
  modified_base (17)..(17): 2'-OMe-nucleotide
  modified_base (18)..(18): 2'-OMe-nucleotide
  modified_base (19)..(19): 2'-OMe-nucleotide
  modified_base (20)..(20): 2'-OMe-nucleotide
  modified_base (21)..(21): 2'-OMe-nucleotide
  modified_base (22)..(22): 2'-OMe-nucleotide
  misc_feature (22)..(23): /note="phosphorothioate bond"
  modified_base (23)..(23): Locked nucleic acid (LNA) nucleotide
  misc_feature (23)..(24): /note="phosphorothioate bond"
  modified_base (24)..(24): Locked nucleic acid (LNA) nucleotide
tttgaguuaucaaggcacauactt

SEQ ID NO: 1296 - DNA, 24 bp, Artificial Sequence
  source: /note="Description of Artificial Sequence: Synthetic oligonucleotide"
  source: /note="Description of Combined DNA/RNA Molecule: Synthetic oligonucleotide"
  modified_base (1)..(1): GalNAc-morpholino-thymidine analog 3
  misc_feature (1)..(2): /note="phosphorothioate bond"
  modified_base (2)..(2): GalNAc-morpholino-thymidine analog 3
  misc_feature (2)..(3): /note="phosphorothioate bond"
  modified_base (3)..(3): GalNAc-morpholino-thymidine analog 3
  modified_base (4)..(4): Locked nucleic acid (LNA) nucleotide
  modified_base (5)..(5): Locked nucleic acid (LNA) nucleotide
  modified_base (6)..(6): 2'-OMe-nucleotide
  modified_base (7)..(7): 2'-OMe-nucleotide
  modified_base (8)..(8): 2'-fluoro-nucleotide
  modified_base (9)..(9): 2'-OMe-nucleotide
  modified_base (10)..(10): 2'-fluoro-nucleotide
  modified_base (11)..(11): 2'-fluoro-nucleotide
  modified_base (12)..(12): 2'-fluoro-nucleotide
  modified_base (13)..(13): 2'-OMe-nucleotide
  modified_base (14)..(14): 2'-OMe-nucleotide
  modified_base (15)..(15): 2'-OMe-nucleotide
  modified_base (16)..(16): 2'-OMe-nucleotide
  modified_base (17)..(17): 2'-OMe-nucleotide
  modified_base (18)..(18): 2'-OMe-nucleotide
  modified_base (19)..(19): 2'-OMe-nucleotide
  modified_base (20)..(20): 2'-OMe-nucleotide
  modified_base (21)..(21): 2'-OMe-nucleotide
  modified_base (22)..(22): 2'-OMe-nucleotide
  misc_feature (22)..(23): /note="phosphorothioate bond"
  modified_base (23)..(23): Locked nucleic acid (LNA) nucleotide
  misc_feature (23)..(24): /note="phosphorothioate bond"
  modified_base (24)..(24): Locked nucleic acid (LNA) nucleotide
tttgaguuaucaaggcacauactt

SEQ ID NO: 1297 - DNA, 22 bp, Artificial Sequence
  source: /note="Description of Artificial Sequence: Synthetic oligonucleotide"
  source: /note="Description of Combined DNA/RNA Molecule: Synthetic oligonucleotide"
  modified_base (1)..(1): GalNAc-morpholino-thymidine analog 3
  modified_base (2)..(2): GalNAc-morpholino-thymidine analog 3
  modified_base (3)..(3): GalNAc-morpholino-thymidine analog 3
  modified_base (4)..(4): 2'-OMe-nucleotide
  modified_base (5)..(5): 2'-OMe-nucleotide
  modified_base (6)..(6): 2'-OMe-nucleotide
  modified_base (7)..(7): 2'-OMe-nucleotide
  modified_base (8)..(8): 2'-fluoro-nucleotide
  modified_base (9)..(9): 2'-OMe-nucleotide
  modified_base (10)..(10): 2'-fluoro-nucleotide
  modified_base (11)..(11): 2'-fluoro-nucleotide
  modified_base (12)..(12): 2'-fluoro-nucleotide
  modified_base (13)..(13): 2'-OMe-nucleotide
  modified_base (14)..(14): 2'-OMe-nucleotide
  modified_base (15)..(15): 2'-OMe-nucleotide
  modified_base (16)..(16): 2'-OMe-nucleotide
  modified_base (17)..(17): 2'-OMe-nucleotide
  modified_base (18)..(18): 2'-OMe-nucleotide
  modified_base (19)..(19): 2'-OMe-nucleotide
  modified_base (20)..(20): 2'-OMe-nucleotide
  misc_feature (20)..(21): /note="phosphorothioate bond"
  modified_base (21)..(21): 2'-OMe-nucleotide
  misc_feature (21)..(22): /note="phosphorothioate bond"
  modified_base (22)..(22): 2'-OMe-nucleotide
tttggacggaguuaucgaggca

SEQ ID NO: 1298 - DNA, 22 bp, Artificial Sequence
  source: /note="Description of Artificial Sequence: Synthetic oligonucleotide"
  source: /note="Description of Combined DNA/RNA Molecule: Synthetic oligonucleotide"
  modified_base (1)..(1): GalNAc-morpholino-thymidine analog 3
  modified_base (2)..(2): GalNAc-morpholino-thymidine analog 3
  modified_base (3)..(3): GalNAc-morpholino-thymidine analog 3
  modified_base (4)..(4): 2'-OMe-nucleotide
  modified_base (5)..(5): 2'-OMe-nucleotide
  modified_base (6)..(6): 2'-OMe-nucleotide
  modified_base (7)..(7): 2'-OMe-nucleotide
  modified_base (8)..(8): 2'-fluoro-nucleotide
  modified_base (9)..(9): 2'-OMe-nucleotide
  modified_base (10)..(10): 2'-fluoro-nucleotide
  modified_base (11)..(11): 2'-fluoro-nucleotide
  modified_base (12)..(12): 2'-fluoro-nucleotide
  modified_base (13)..(13): 2'-OMe-nucleotide
  modified_base (14)..(14): 2'-OMe-nucleotide
  modified_base (15)..(15): 2'-OMe-nucleotide
  modified_base (16)..(16): 2'-OMe-nucleotide
  modified_base (17)..(17): 2'-OMe-nucleotide
  modified_base (18)..(18): 2'-OMe-nucleotide
  modified_base (19)..(19): 2'-OMe-nucleotide
  modified_base (20)..(20): 2'-OMe-nucleotide
  misc_feature (20)..(21): /note="phosphorothioate bond"
  modified_base (21)..(21): 2'-OMe-nucleotide
  misc_feature (21)..(22): /note="phosphorothioate bond"
  modified_base (22)..(22): 2'-OMe-nucleotide
tttggacggaguuaucgaggca

SEQ ID NO: 1299 - DNA, 22 bp, Artificial Sequence
  source: /note="Description of Artificial Sequence: Synthetic oligonucleotide"
  source: /note="Description of Combined DNA/RNA Molecule: Synthetic oligonucleotide"
  modified_base (1)..(1): GalNAc-morpholino-thymidine analog 3
  modified_base (2)..(2): GalNAc-morpholino-thymidine analog 3
  modified_base (3)..(3): GalNAc-morpholino-thymidine analog 3
  modified_base (4)..(4): 2'-OMe-nucleotide
  modified_base (5)..(5): 2'-OMe-nucleotide
  modified_base (6)..(6): 2'-OMe-nucleotide
  modified_base (7)..(7): 2'-OMe-nucleotide
  modified_base (8)..(8): 2'-fluoro-nucleotide
  modified_base (9)..(9): 2'-OMe-nucleotide
  modified_base (10)..(10): 2'-fluoro-nucleotide
  modified_base (11)..(11): 2'-fluoro-nucleotide
  modified_base (12)..(12): 2'-fluoro-nucleotide
  modified_base (13)..(13): 2'-OMe-nucleotide
  modified_base (14)..(14): 2'-OMe-nucleotide
  modified_base (15)..(15): 2'-OMe-nucleotide
  modified_base (16)..(16): 2'-OMe-nucleotide
  modified_base (17)..(17): 2'-OMe-nucleotide
  modified_base (18)..(18): 2'-OMe-nucleotide
  modified_base (19)..(19): 2'-OMe-nucleotide
  modified_base (20)..(20): 2'-OMe-nucleotide
  misc_feature (20)..(21): /note="phosphorothioate bond"
  modified_base (21)..(21): 2'-OMe-nucleotide
  misc_feature (21)..(22): /note="phosphorothioate bond"
  modified_base (22)..(22): 2'-OMe-nucleotide
tttggacggaguuaucgaggca

SEQ ID NO: 1300 - DNA, 22 bp, Artificial Sequence
  source: /note="Description of Artificial Sequence: Synthetic oligonucleotide"
  source: /note="Description of Combined DNA/RNA Molecule: Synthetic oligonucleotide"
  modified_base (1)..(1): GalNAc-morpholino-thymidine analog 3
  modified_base (2)..(2): GalNAc-morpholino-thymidine analog 3
  modified_base (3)..(3): GalNAc-morpholino-thymidine analog 3
  modified_base (4)..(4): 2'-OMe-nucleotide
  modified_base (5)..(5): 2'-OMe-nucleotide
  modified_base (6)..(6): 2'-OMe-nucleotide
  modified_base (7)..(7): 2'-OMe-nucleotide
  modified_base (8)..(8): 2'-fluoro-nucleotide
  modified_base (9)..(9): 2'-OMe-nucleotide
  modified_base (10)..(10): 2'-fluoro-nucleotide
  modified_base (11)..(11): 2'-fluoro-nucleotide
  modified_base (12)..(12): 2'-fluoro-nucleotide
  modified_base (13)..(13): 2'-OMe-nucleotide
  modified_base (14)..(14): 2'-OMe-nucleotide
  modified_base (15)..(15): 2'-OMe-nucleotide
  modified_base (16)..(16): 2'-OMe-nucleotide
  modified_base (17)..(17): 2'-OMe-nucleotide
  modified_base (18)..(18): 2'-OMe-nucleotide
  modified_base (19)..(19): 2'-OMe-nucleotide
  modified_base (20)..(20): 2'-OMe-nucleotide
  misc_feature (20)..(21): /note="phosphorothioate bond"
  modified_base (21)..(21): 2'-OMe-nucleotide
  misc_feature (21)..(22): /note="phosphorothioate bond"
  modified_base (22)..(22): 2'-OMe-nucleotide
tttggacggaguuaucgaggca

SEQ ID NO: 1301 - DNA, 22 bp, Artificial Sequence
  source: /note="Description of Artificial Sequence: Synthetic oligonucleotide"
  source: /note="Description of Combined DNA/RNA Molecule: Synthetic oligonucleotide"
  modified_base (1)..(1): GalNAc-morpholino-thymidine analog 3
  modified_base (2)..(2): GalNAc-morpholino-thymidine analog 3
  modified_base (3)..(3): GalNAc-morpholino-thymidine analog 3
  modified_base (4)..(4): 2'-OMe-nucleotide
  modified_base (5)..(5): 2'-OMe-nucleotide
  modified_base (6)..(6): 2'-OMe-nucleotide
  modified_base (7)..(7): 2'-OMe-nucleotide
  modified_base (8)..(8): 2'-fluoro-nucleotide
  modified_base (9)..(9): 2'-OMe-nucleotide
  modified_base (10)..(10): 2'-fluoro-nucleotide
  modified_base (11)..(11): 2'-fluoro-nucleotide
  modified_base (12)..(12): 2'-fluoro-nucleotide
  modified_base (13)..(13): 2'-OMe-nucleotide
  modified_base (14)..(14): 2'-OMe-nucleotide
  modified_base (15)..(15): 2'-OMe-nucleotide
  modified_base (16)..(16): 2'-OMe-nucleotide
  modified_base (17)..(17): 2'-OMe-nucleotide
  modified_base (18)..(18): 2'-OMe-nucleotide
  modified_base (19)..(19): 2'-OMe-nucleotide
  modified_base (20)..(20): 2'-OMe-nucleotide
  misc_feature (20)..(21): /note="phosphorothioate bond"
  modified_base (21)..(21): 2'-OMe-nucleotide
  misc_feature (21)..(22): /note="phosphorothioate bond"
  modified_base (22)..(22): 2'-OMe-nucleotide
tttggacggaguuaucgaggca

SEQ ID NO: 1302 - DNA, 22 bp, Artificial Sequence
  source: /note="Description of Artificial Sequence: Synthetic oligonucleotide"
  source: /note="Description of Combined DNA/RNA Molecule: Synthetic oligonucleotide"
  modified_base (1)..(1): GalNAc-morpholino-thymidine analog 3
  modified_base (2)..(2): GalNAc-morpholino-thymidine analog 3
  modified_base (3)..(3): GalNAc-morpholino-thymidine analog 3
  modified_base (4)..(4): Locked nucleic acid (LNA) nucleotide
  modified_base (5)..(5): Locked nucleic acid (LNA) nucleotide
  modified_base (6)..(6): 2'-OMe-nucleotide
  modified_base (7)..(7): 2'-OMe-nucleotide
  modified_base (8)..(8): 2'-fluoro-nucleotide
  modified_base (9)..(9): 2'-OMe-nucleotide
  modified_base (10)..(10): 2'-fluoro-nucleotide
  modified_base (11)..(11): 2'-fluoro-nucleotide
  modified_base (12)..(12): 2'-fluoro-nucleotide
  modified_base (13)..(13): 2'-OMe-nucleotide
  modified_base (14)..(14): 2'-OMe-nucleotide
  modified_base (15)..(15): 2'-OMe-nucleotide
  modified_base (16)..(16): 2'-OMe-nucleotide
  modified_base (17)..(17): 2'-OMe-nucleotide
  modified_base (18)..(18): 2'-OMe-nucleotide
  modified_base (19)..(19): 2'-OMe-nucleotide
  modified_base (20)..(20): 2'-OMe-nucleotide
  misc_feature (20)..(21): /note="phosphorothioate bond"
  modified_base (21)..(21): 2'-OMe-nucleotide
  misc_feature (21)..(22): /note="phosphorothioate bond"
  modified_base (22)..(22): 2'-OMe-nucleotide
tttggacggaguuaucgaggca

SEQ ID NO: 1303 - DNA, 22 bp, Artificial Sequence
  source: /note="Description of Artificial Sequence: Synthetic oligonucleotide"
  source: /note="Description of Combined DNA/RNA Molecule: Synthetic oligonucleotide"
  modified_base (1)..(1): GalNAc-morpholino-thymidine analog 3
  modified_base (2)..(2): GalNAc-morpholino-thymidine analog 3
  modified_base (3)..(3): GalNAc-morpholino-thymidine analog 3
  modified_base (4)..(4): Locked nucleic acid (LNA) nucleotide
  modified_base (5)..(5): Locked nucleic acid (LNA) nucleotide
  modified_base (6)..(6): 2'-OMe-nucleotide
  modified_base (7)..(7): 2'-OMe-nucleotide
  modified_base (8)..(8): 2'-fluoro-nucleotide
  modified_base (9)..(9): 2'-OMe-nucleotide
  modified_base (10)..(10): 2'-fluoro-nucleotide
  modified_base (11)..(11): 2'-fluoro-nucleotide
  modified_base (12)..(12): 2'-fluoro-nucleotide
  modified_base (13)..(13): 2'-OMe-nucleotide
  modified_base (14)..(14): 2'-OMe-nucleotide
  modified_base (15)..(15): 2'-OMe-nucleotide
  modified_base (16)..(16): 2'-OMe-nucleotide
  modified_base (17)..(17): 2'-OMe-nucleotide
  modified_base (18)..(18): 2'-OMe-nucleotide
  modified_base (19)..(19): 2'-OMe-nucleotide
  modified_base (20)..(20): 2'-OMe-nucleotide
  misc_feature (20)..(21): /note="phosphorothioate bond"
  modified_base (21)..(21): 2'-OMe-nucleotide
  misc_feature (21)..(22): /note="phosphorothioate bond"
  modified_base (22)..(22): 2'-OMe-nucleotide
tttggacggaguuaucgaggca

SEQ ID NO: 1304 - DNA, 22 bp, Artificial Sequence
  source: /note="Description of Artificial Sequence: Synthetic oligonucleotide"
  source: /note="Description of Combined DNA/RNA Molecule: Synthetic oligonucleotide"
  modified_base (1)..(1): GalNAc-morpholino-thymidine analog 3
  modified_base (2)..(2): GalNAc-morpholino-thymidine analog 3
  modified_base (3)..(3): GalNAc-morpholino-thymidine analog 3
  modified_base (4)..(4): Locked nucleic acid (LNA) nucleotide
  modified_base (5)..(5): Locked nucleic acid (LNA) nucleotide
  modified_base (6)..(6): 2'-OMe-nucleotide
  modified_base (7)..(7): 2'-OMe-nucleotide
  modified_base (8)..(8): 2'-fluoro-nucleotide
  modified_base (9)..(9): 2'-OMe-nucleotide
  modified_base (10)..(10): 2'-fluoro-nucleotide
  modified_base (11)..(11): 2'-fluoro-nucleotide
  modified_base (12)..(12): 2'-fluoro-nucleotide
  modified_base (13)..(13): 2'-OMe-nucleotide
  modified_base (14)..(14): 2'-OMe-nucleotide
  modified_base (15)..(15): 2'-OMe-nucleotide
  modified_base (16)..(16): 2'-OMe-nucleotide
  modified_base (17)..(17): 2'-OMe-nucleotide
  modified_base (18)..(18): 2'-OMe-nucleotide
  modified_base (19)..(19): 2'-OMe-nucleotide
  modified_base (20)..(20): 2'-OMe-nucleotide
  misc_feature (20)..(21): /note="phosphorothioate bond"
  modified_base (21)..(21): 2'-OMe-nucleotide
  misc_feature (21)..(22): /note="phosphorothioate bond"
  modified_base (22)..(22): 2'-OMe-nucleotide
tttggacggaguuaucgaggca

SEQ ID NO: 1305 - DNA, 22 bp, Artificial Sequence
  source: /note="Description of Artificial Sequence: Synthetic oligonucleotide"
  source: /note="Description of Combined DNA/RNA Molecule: Synthetic oligonucleotide"
  modified_base (1)..(1): GalNAc-morpholino-thymidine analog 3
  modified_base (2)..(2): GalNAc-morpholino-thymidine analog 3
  modified_base (3)..(3): GalNAc-morpholino-thymidine analog 3
  modified_base (4)..(4): Locked nucleic acid (LNA) nucleotide
  modified_base (5)..(5): Locked nucleic acid (LNA) nucleotide
  modified_base (6)..(6): 2'-OMe-nucleotide
  modified_base (7)..(7): 2'-OMe-nucleotide
  modified_base (8)..(8): 2'-fluoro-nucleotide
  modified_base (9)..(9): 2'-OMe-nucleotide
  modified_base (10)..(10): 2'-fluoro-nucleotide
  modified_base (11)..(11): 2'-fluoro-nucleotide
  modified_base (12)..(12): 2'-fluoro-nucleotide
  modified_base (13)..(13): 2'-OMe-nucleotide
  modified_base (14)..(14): 2'-OMe-nucleotide
  modified_base (15)..(15): 2'-OMe-nucleotide
  modified_base (16)..(16): 2'-OMe-nucleotide
  modified_base (17)..(17): 2'-OMe-nucleotide
  modified_base (18)..(18): 2'-OMe-nucleotide
  modified_base (19)..(19): 2'-OMe-nucleotide
  modified_base (20)..(20): 2'-OMe-nucleotide
  misc_feature (20)..(21): /note="phosphorothioate bond"
  modified_base (21)..(21): 2'-OMe-nucleotide
  misc_feature (21)..(22): /note="phosphorothioate bond"
  modified_base (22)..(22): 2'-OMe-nucleotide
tttggacggaguuaucgaggca

SEQ ID NO: 1306 - DNA, 22 bp, Artificial Sequence
  source: /note="Description of Artificial Sequence: Synthetic oligonucleotide"
  source: /note="Description of Combined DNA/RNA Molecule: Synthetic oligonucleotide"
  modified_base (1)..(1): GalNAc-morpholino-thymidine analog 3
  modified_base (2)..(2): GalNAc-morpholino-thymidine analog 3
  modified_base (3)..(3): GalNAc-morpholino-thymidine analog 3
  modified_base (4)..(4): Locked nucleic acid (LNA) nucleotide
  modified_base (5)..(5): Locked nucleic acid (LNA) nucleotide
  modified_base (6)..(6): 2'-OMe-nucleotide
  modified_base (7)..(7): 2'-OMe-nucleotide
  modified_base (8)..(8): 2'-fluoro-nucleotide
  modified_base (9)..(9): 2'-OMe-nucleotide
  modified_base (10)..(10): 2'-fluoro-nucleotide
  modified_base (11)..(11): 2'-fluoro-nucleotide
  modified_base (12)..(12): 2'-fluoro-nucleotide
  modified_base (13)..(13): 2'-OMe-nucleotide
  modified_base (14)..(14): 2'-OMe-nucleotide
  modified_base (15)..(15): 2'-OMe-nucleotide
  modified_base (16)..(16): 2'-OMe-nucleotide
  modified_base (17)..(17): 2'-OMe-nucleotide
  modified_base (18)..(18): 2'-OMe-nucleotide
  modified_base (19)..(19): 2'-OMe-nucleotide
  modified_base (20)..(20): 2'-OMe-nucleotide
  misc_feature (20)..(21): /note="phosphorothioate bond"
  modified_base (21)..(21): 2'-OMe-nucleotide
  misc_feature (21)..(22): /note="phosphorothioate bond"
  modified_base (22)..(22): 2'-OMe-nucleotide
tttggacggaguuaucgaggca

SEQ ID NO: 1307 - DNA, 22 bp, Artificial Sequence
  source: /note="Description of Artificial Sequence: Synthetic oligonucleotide"
  source: /note="Description of Combined DNA/RNA Molecule: Synthetic oligonucleotide"
  modified_base (1)..(1): GalNAc-morpholino-thymidine analog 3
  modified_base (2)..(2): GalNAc-morpholino-thymidine analog 3
  modified_base (3)..(3): GalNAc-morpholino-thymidine analog 3
  modified_base (4)..(4): 2'-OMe-nucleotide
  modified_base (5)..(5): 2'-OMe-nucleotide
  modified_base (6)..(6): 2'-OMe-nucleotide
  modified_base (7)..(7): 2'-OMe-nucleotide
  modified_base (8)..(8): 2'-fluoro-nucleotide
  modified_base (9)..(9): 2'-OMe-nucleotide
  modified_base (10)..(10): 2'-fluoro-nucleotide
  modified_base (11)..(11): 2'-fluoro-nucleotide
  modified_base (12)..(12): 2'-fluoro-nucleotide
  modified_base (13)..(13): 2'-OMe-nucleotide
  modified_base (14)..(14): 2'-OMe-nucleotide
  modified_base (15)..(15): 2'-OMe-nucleotide
  modified_base (16)..(16): 2'-OMe-nucleotide
  modified_base (17)..(17): 2'-OMe-nucleotide
  modified_base (18)..(18): 2'-OMe-nucleotide
  modified_base (19)..(19): 2'-OMe-nucleotide
  modified_base (20)..(20): 2'-OMe-nucleotide
  modified_base (21)..(21): Locked nucleic acid (LNA) nucleotide
  modified_base (22)..(22): Locked nucleic acid (LNA) nucleotide
tttggacggaguuaucgaggtt

SEQ ID NO: 1308 - DNA, 22 bp, Artificial Sequence
  source: /note="Description of Artificial Sequence: Synthetic oligonucleotide"
  source: /note="Description of Combined DNA/RNA Molecule: Synthetic oligonucleotide"
  modified_base (1)..(1): GalNAc-morpholino-thymidine analog 3
  modified_base (2)..(2): GalNAc-morpholino-thymidine analog 3
  modified_base (3)..(3): GalNAc-morpholino-thymidine analog 3
  modified_base (4)..(4): 2'-OMe-nucleotide
  modified_base (5)..(5): 2'-OMe-nucleotide
  modified_base (6)..(6): 2'-OMe-nucleotide
  modified_base (7)..(7): 2'-OMe-nucleotide
  modified_base (8)..(8): 2'-fluoro-nucleotide
  modified_base (9)..(9): 2'-OMe-nucleotide
  modified_base (10)..(10): 2'-fluoro-nucleotide
  modified_base (11)..(11): 2'-fluoro-nucleotide
  modified_base (12)..(12): 2'-fluoro-nucleotide
  modified_base (13)..(13): 2'-OMe-nucleotide
  modified_base (14)..(14): 2'-OMe-nucleotide
  modified_base (15)..(15): 2'-OMe-nucleotide
  modified_base (16)..(16): 2'-OMe-nucleotide
  modified_base (17)..(17): 2'-OMe-nucleotide
  modified_base (18)..(18): 2'-OMe-nucleotide
  modified_base (19)..(19): 2'-OMe-nucleotide
  modified_base (20)..(20): 2'-OMe-nucleotide
  modified_base (21)..(21): Locked nucleic acid (LNA) nucleotide
  modified_base (22)..(22): Locked nucleic acid (LNA) nucleotide
tttggacggaguuaucgaggtt

SEQ ID NO: 1309 - DNA, 22 bp, Artificial Sequence
  source: /note="Description of Artificial Sequence: Synthetic oligonucleotide"
  source: /note="Description of Combined DNA/RNA Molecule: Synthetic oligonucleotide"
  modified_base (1)..(1): GalNAc-morpholino-thymidine analog 3
  modified_base (2)..(2): GalNAc-morpholino-thymidine analog 3
  modified_base (3)..(3): GalNAc-morpholino-thymidine analog 3
  modified_base (4)..(4): 2'-OMe-nucleotide
  modified_base (5)..(5): 2'-OMe-nucleotide
  modified_base (6)..(6): 2'-OMe-nucleotide
  modified_base (7)..(7): 2'-OMe-nucleotide
  modified_base (8)..(8): 2'-fluoro-nucleotide
  modified_base (9)..(9): 2'-OMe-nucleotide
  modified_base (10)..(10): 2'-fluoro-nucleotide
  modified_base (11)..(11): 2'-fluoro-nucleotide
  modified_base (12)..(12): 2'-fluoro-nucleotide
  modified_base (13)..(13): 2'-OMe-nucleotide
  modified_base (14)..(14): 2'-OMe-nucleotide
  modified_base (15)..(15): 2'-OMe-nucleotide
  modified_base (16)..(16): 2'-OMe-nucleotide
  modified_base (17)..(17): 2'-OMe-nucleotide
  modified_base (18)..(18): 2'-OMe-nucleotide
  modified_base (19)..(19): 2'-OMe-nucleotide
  modified_base (20)..(20): 2'-OMe-nucleotide
  modified_base (21)..(21): Locked nucleic acid (LNA) nucleotide
  modified_base (22)..(22): Locked nucleic acid (LNA) nucleotide
tttggacggaguuaucgaggtt

SEQ ID NO: 1310 - DNA, 22 bp, Artificial Sequence
  source: /note="Description of Artificial Sequence: Synthetic oligonucleotide"
  source: /note="Description of Combined DNA/RNA Molecule: Synthetic oligonucleotide"
  modified_base (1)..(1): GalNAc-morpholino-thymidine analog 3
  modified_base (2)..(2): GalNAc-morpholino-thymidine analog 3
  modified_base (3)..(3): GalNAc-morpholino-thymidine analog 3
  modified_base (4)..(4): 2'-OMe-nucleotide
  modified_base (5)..(5): 2'-OMe-nucleotide
  modified_base (6)..(6): 2'-OMe-nucleotide
  modified_base (7)..(7): 2'-OMe-nucleotide
  modified_base (8)..(8): 2'-fluoro-nucleotide
  modified_base (9)..(9): 2'-OMe-nucleotide
  modified_base (10)..(10): 2'-fluoro-nucleotide
  modified_base (11)..(11): 2'-fluoro-nucleotide
  modified_base (12)..(12): 2'-fluoro-nucleotide
  modified_base (13)..(13): 2'-OMe-nucleotide
  modified_base (14)..(14): 2'-OMe-nucleotide
  modified_base (15)..(15): 2'-OMe-nucleotide
  modified_base (16)..(16): 2'-OMe-nucleotide
  modified_base (17)..(17): 2'-OMe-nucleotide
  modified_base (18)..(18): 2'-OMe-nucleotide
  modified_base (19)..(19): 2'-OMe-nucleotide
  modified_base (20)..(20): 2'-OMe-nucleotide
  modified_base (21)..(21): Locked nucleic acid (LNA) nucleotide
  modified_base (22)..(22): Locked nucleic acid (LNA) nucleotide
tttggacggaguuaucgaggtt

SEQ ID NO: 1311 - DNA, 22 bp, Artificial Sequence
  source: /note="Description of Artificial Sequence: Synthetic oligonucleotide"
  source: /note="Description of Combined DNA/RNA Molecule: Synthetic oligonucleotide"
  modified_base (1)..(1): GalNAc-morpholino-thymidine analog 3
  modified_base (2)..(2): GalNAc-morpholino-thymidine analog 3
  modified_base (3)..(3): GalNAc-morpholino-thymidine analog 3
  modified_base (4)..(4): 2'-OMe-nucleotide
  modified_base (5)..(5): 2'-OMe-nucleotide
  modified_base (6)..(6): 2'-OMe-nucleotide
  modified_base (7)..(7): 2'-OMe-nucleotide
  modified_base (8)..(8): 2'-fluoro-nucleotide
  modified_base (9)..(9): 2'-OMe-nucleotide
  modified_base (10)..(10): 2'-fluoro-nucleotide
  modified_base (11)..(11): 2'-fluoro-nucleotide
  modified_base (12)..(12): 2'-fluoro-nucleotide
  modified_base (13)..(13): 2'-OMe-nucleotide
  modified_base (14)..(14): 2'-OMe-nucleotide
  modified_base (15)..(15): 2'-OMe-nucleotide
  modified_base (16)..(16): 2'-OMe-nucleotide
  modified_base (17)..(17): 2'-OMe-nucleotide
  modified_base (18)..(18): 2'-OMe-nucleotide
  modified_base (19)..(19): 2'-OMe-nucleotide
  modified_base (20)..(20): 2'-OMe-nucleotide
  modified_base (21)..(21): Locked nucleic acid (LNA) nucleotide
  modified_base (22)..(22): Locked nucleic acid (LNA) nucleotide
tttggacggaguuaucgaggtt

SEQ ID NO: 1312 - DNA, 22 bp, Artificial Sequence
  source: /note="Description of Artificial Sequence: Synthetic oligonucleotide"
  source: /note="Description of Combined DNA/RNA Molecule: Synthetic oligonucleotide"
  modified_base (1)..(1): GalNAc-morpholino-thymidine analog 3
  modified_base (2)..(2): GalNAc-morpholino-thymidine analog 3
  modified_base (3)..(3): GalNAc-morpholino-thymidine analog 3
  modified_base (4)..(4): 2'-OMe-nucleotide
  modified_base (5)..(5): 2'-OMe-nucleotide
  modified_base (6)..(6): 2'-OMe-nucleotide
  modified_base (7)..(7): 2'-OMe-nucleotide
  modified_base (8)..(8): 2'-fluoro-nucleotide
  modified_base (9)..(9): 2'-OMe-nucleotide
  modified_base (10)..(10): 2'-fluoro-nucleotide
  modified_base (11)..(11): 2'-fluoro-nucleotide
  modified_base (12)..(12): 2'-fluoro-nucleotide
  modified_base (13)..(13): 2'-OMe-nucleotide
  modified_base (14)..(14): 2'-OMe-nucleotide
  modified_base (15)..(15): 2'-OMe-nucleotide
  modified_base (16)..(16): 2'-OMe-nucleotide
  modified_base (17)..(17): 2'-OMe-nucleotide
  modified_base (18)..(18): 2'-OMe-nucleotide
  modified_base (19)..(19): 2'-OMe-nucleotide
  modified_base (20)..(20): 2'-OMe-nucleotide
  modified_base (21)..(21): Locked nucleic acid (LNA) nucleotide
  modified_base (22)..(22): Locked nucleic acid (LNA) nucleotide
tttggacggaguuaucgaggtt

SEQ ID NO: 1313 - DNA, 22 bp, Artificial Sequence
  source: /note="Description of Artificial Sequence: Synthetic oligonucleotide"
  source: /note="Description of Combined DNA/RNA Molecule: Synthetic oligonucleotide"
  modified_base (1)..(1): GalNAc-morpholino-thymidine analog 3
  modified_base (2)..(2): GalNAc-morpholino-thymidine analog 3
  modified_base (3)..(3): GalNAc-morpholino-thymidine analog 3
  modified_base (4)..(4): 2'-OMe-nucleotide
  modified_base (5)..(5): 2'-OMe-nucleotide
  modified_base (6)..(6): 2'-OMe-nucleotide
  modified_base (7)..(7): 2'-OMe-nucleotide
  modified_base (8)..(8): 2'-fluoro-nucleotide
  modified_base (9)..(9): 2'-OMe-nucleotide
  modified_base (10)..(10): 2'-fluoro-nucleotide
  modified_base (11)..(11): 2'-fluoro-nucleotide
  modified_base (12)..(12): 2'-fluoro-nucleotide
  modified_base (13)..(13): 2'-OMe-nucleotide
  modified_base (14)..(14): 2'-OMe-nucleotide
  modified_base (15)..(15): 2'-OMe-nucleotide
  modified_base (16)..(16): 2'-OMe-nucleotide
  modified_base (17)..(17): 2'-OMe-nucleotide
  modified_base (18)..(18): 2'-OMe-nucleotide
  modified_base (19)..(19): 2'-OMe-nucleotide
  modified_base (20)..(20): 2'-OMe-nucleotide
  modified_base (21)..(21): Locked nucleic acid (LNA) nucleotide
  modified_base (22)..(22): Locked nucleic acid (LNA) nucleotide
tttggacggaguuaucgaggtt

SEQ ID NO: 1314 - DNA, 22 bp, Artificial Sequence
  source: /note="Description of Artificial Sequence: Synthetic oligonucleotide"
  source: /note="Description of Combined DNA/RNA Molecule: Synthetic oligonucleotide"
  modified_base (1)..(1): GalNAc-morpholino-thymidine analog 3
  modified_base (2)..(2): GalNAc-morpholino-thymidine analog 3
  modified_base (3)..(3): GalNAc-morpholino-thymidine analog 3
  modified_base (4)..(4): 2'-OMe-nucleotide
  modified_base (5)..(5): 2'-OMe-nucleotide
  modified_base (6)..(6): 2'-OMe-nucleotide
  modified_base (7)..(7): 2'-OMe-nucleotide
  modified_base (8)..(8): 2'-fluoro-nucleotide
  modified_base (9)..(9): 2'-OMe-nucleotide
  modified_base (10)..(10): 2'-fluoro-nucleotide
  modified_base (11)..(11): 2'-fluoro-nucleotide
  modified_base (12)..(12): 2'-fluoro-nucleotide
  modified_base (13)..(13): 2'-OMe-nucleotide
  modified_base (14)..(14): 2'-OMe-nucleotide
  modified_base (15)..(15): 2'-OMe-nucleotide
  modified_base (16)..(16): 2'-OMe-nucleotide
  modified_base (17)..(17): 2'-OMe-nucleotide
  modified_base (18)..(18): 2'-OMe-nucleotide
  modified_base (19)..(19): 2'-OMe-nucleotide
  modified_base (20)..(20): 2'-OMe-nucleotide
  modified_base (21)..(21): Locked nucleic acid (LNA) nucleotide
  modified_base (22)..(22): Locked nucleic acid (LNA) nucleotide
tttggacggaguuaucgaggtt

SEQ ID NO: 1315 - DNA, 22 bp, Artificial Sequence
  source: /note="Description of Artificial Sequence: Synthetic oligonucleotide"
  source: /note="Description of Combined DNA/RNA Molecule: Synthetic oligonucleotide"
  modified_base (1)..(1): GalNAc-morpholino-thymidine analog 3
  modified_base (2)..(2): GalNAc-morpholino-thymidine analog 3
  modified_base (3)..(3): GalNAc-morpholino-thymidine analog 3
  modified_base (4)..(4): 2'-OMe-nucleotide
  modified_base (5)..(5): 2'-OMe-nucleotide
  modified_base (6)..(6): 2'-OMe-nucleotide
  modified_base (7)..(7): 2'-OMe-nucleotide
  modified_base (8)..(8): 2'-fluoro-nucleotide
  modified_base (9)..(9): 2'-OMe-nucleotide
  modified_base (10)..(10): 2'-fluoro-nucleotide
  modified_base (11)..(11): 2'-fluoro-nucleotide
  modified_base (12)..(12): 2'-fluoro-nucleotide
  modified_base (13)..(13): 2'-OMe-nucleotide
  modified_base (14)..(14): 2'-OMe-nucleotide
  modified_base (15)..(15): 2'-OMe-nucleotide
  modified_base (16)..(16): 2'-OMe-nucleotide
  modified_base (17)..(17): 2'-OMe-nucleotide
  modified_base (18)..(18): 2'-OMe-nucleotide
  modified_base (19)..(19): 2'-OMe-nucleotide
  modified_base (20)..(20): 2'-OMe-nucleotide
  modified_base (21)..(21): Locked nucleic acid (LNA) nucleotide
  modified_base (22)..(22): Locked nucleic acid (LNA) nucleotide
tttggacggaguuaucgaggtt

SEQ ID NO: 1316 - DNA, 22 bp, Artificial Sequence
  source: /note="Description of Artificial Sequence: Synthetic oligonucleotide"
  source: /note="Description of Combined DNA/RNA Molecule: Synthetic oligonucleotide"
  modified_base (1)..(1): GalNAc-morpholino-thymidine analog 3
  misc_feature (1)..(2): /note="phosphorothioate bond"
  modified_base (2)..(2): GalNAc-morpholino-thymidine analog 3
  misc_feature (2)..(3): /note="phosphorothioate bond"
  modified_base (3)..(3): GalNAc-morpholino-thymidine analog 3
  modified_base (4)..(4): 2'-OMe-nucleotide
  modified_base (5)..(5): 2'-OMe-nucleotide
  modified_base (6)..(6): 2'-OMe-nucleotide
  modified_base (7)..(7): 2'-OMe-nucleotide
  modified_base (8)..(8): 2'-fluoro-nucleotide
  modified_base (9)..(9): 2'-OMe-nucleotide
  modified_base (10)..(10): 2'-fluoro-nucleotide
  modified_base (11)..(11): 2'-fluoro-nucleotide
  modified_base (12)..(12): 2'-fluoro-nucleotide
  modified_base (13)..(13): 2'-OMe-nucleotide
  modified_base (14)..(14): 2'-OMe-nucleotide
  modified_base (15)..(15): 2'-OMe-nucleotide
  modified_base (16)..(16): 2'-OMe-nucleotide
  modified_base (17)..(17): 2'-OMe-nucleotide
  modified_base (18)..(18): 2'-OMe-nucleotide
  modified_base (19)..(19): 2'-OMe-nucleotide
  modified_base (20)..(20): 2'-OMe-nucleotide
  misc_feature (20)..(21): /note="phosphorothioate bond"
  modified_base (21)..(21): Locked nucleic acid (LNA) nucleotide
  misc_feature (21)..(22): /note="phosphorothioate bond"
  modified_base (22)..(22): Locked nucleic acid (LNA) nucleotide
tttggacggaguuaucgaggtt

SEQ ID NO: 1317 - DNA, 22 bp, Artificial Sequence
  source: /note="Description of Artificial Sequence: Synthetic oligonucleotide"
  source: /note="Description of Combined DNA/RNA Molecule: Synthetic oligonucleotide"
  modified_base (1)..(1): GalNAc-morpholino-thymidine analog 3
  misc_feature (1)..(2): /note="phosphorothioate bond"
  modified_base (2)..(2): GalNAc-morpholino-thymidine analog 3
  misc_feature (2)..(3): /note="phosphorothioate bond"
  modified_base (3)..(3): GalNAc-morpholino-thymidine analog 3
  modified_base (4)..(4): 2'-OMe-nucleotide
  modified_base (5)..(5): 2'-OMe-nucleotide
  modified_base (6)..(6): 2'-OMe-nucleotide
  modified_base (7)..(7): 2'-OMe-nucleotide
  modified_base (8)..(8): 2'-fluoro-nucleotide
  modified_base (9)..(9): 2'-OMe-nucleotide
  modified_base (10)..(10): 2'-fluoro-nucleotide
  modified_base (11)..(11): 2'-fluoro-nucleotide
  modified_base (12)..(12): 2'-fluoro-nucleotide
  modified_base (13)..(13): 2'-OMe-nucleotide
  modified_base (14)..(14): 2'-OMe-nucleotide
  modified_base (15)..(15): 2'-OMe-nucleotide
  modified_base (16)..(16): 2'-OMe-nucleotide
  modified_base (17)..(17): 2'-OMe-nucleotide
  modified_base (18)..(18): 2'-OMe-nucleotide
  modified_base (19)..(19): 2'-OMe-nucleotide
  modified_base (20)..(20): 2'-OMe-nucleotide
  misc_feature (20)..(21): /note="phosphorothioate bond"
  modified_base (21)..(21): Locked nucleic acid (LNA) nucleotide
  misc_feature (21)..(22): /note="phosphorothioate bond"
  modified_base (22)..(22): Locked nucleic acid (LNA) nucleotide
tttggacggaguuaucgaggtt

SEQ ID NO: 1318 - DNA, 22 bp, Artificial Sequence
  source: /note="Description of Artificial Sequence: Synthetic oligonucleotide"
  source: /note="Description of Combined DNA/RNA Molecule: Synthetic oligonucleotide"
  modified_base (1)..(1): GalNAc-morpholino-thymidine analog 3
  misc_feature (1)..(2): /note="phosphorothioate bond"
  modified_base (2)..(2): GalNAc-morpholino-thymidine analog 3
  misc_feature (2)..(3): /note="phosphorothioate bond"
  modified_base (3)..(3): GalNAc-morpholino-thymidine analog 3
  modified_base (4)..(4): 2'-OMe-nucleotide
  modified_base (5)..(5): 2'-OMe-nucleotide
  modified_base (6)..(6): 2'-OMe-nucleotide
  modified_base (7)..(7): 2'-OMe-nucleotide
  modified_base (8)..(8): 2'-fluoro-nucleotide
  modified_base (9)..(9): 2'-OMe-nucleotide
  modified_base (10)..(10): 2'-fluoro-nucleotide
  modified_base (11)..(11): 2'-fluoro-nucleotide
  modified_base (12)..(12): 2'-fluoro-nucleotide
  modified_base (13)..(13): 2'-OMe-nucleotide
  modified_base (14)..(14): 2'-OMe-nucleotide
  modified_base (15)..(15): 2'-OMe-nucleotide
  modified_base (16)..(16): 2'-OMe-nucleotide
  modified_base (17)..(17): 2'-OMe-nucleotide
  modified_base (18)..(18): 2'-OMe-nucleotide
  modified_base (19)..(19): 2'-OMe-nucleotide
  modified_base (20)..(20): 2'-OMe-nucleotide
  misc_feature (20)..(21): /note="phosphorothioate bond"
  modified_base (21)..(21): Locked nucleic acid (LNA) nucleotide
  misc_feature (21)..(22): /note="phosphorothioate bond"
  modified_base (22)..(22): Locked nucleic acid (LNA) nucleotide
tttggacggaguuaucgaggtt

SEQ ID NO: 1319 - DNA, 22 bp, Artificial Sequence
  source: /note="Description of Artificial Sequence: Synthetic oligonucleotide"
  source: /note="Description of Combined DNA/RNA Molecule: Synthetic oligonucleotide"
  modified_base (1)..(1): GalNAc-morpholino-thymidine analog 3
  misc_feature (1)..(2): /note="phosphorothioate bond"
  modified_base (2)..(2): GalNAc-morpholino-thymidine analog 3
  misc_feature (2)..(3): /note="phosphorothioate bond"
  modified_base (3)..(3): GalNAc-morpholino-thymidine analog 3
  modified_base (4)..(4): 2'-OMe-nucleotide
  modified_base (5)..(5): 2'-OMe-nucleotide
  modified_base (6)..(6): 2'-OMe-nucleotide
  modified_base (7)..(7): 2'-OMe-nucleotide
  modified_base (8)..(8): 2'-fluoro-nucleotide
  modified_base (9)..(9): 2'-OMe-nucleotide
  modified_base (10)..(10): 2'-fluoro-nucleotide
  modified_base (11)..(11): 2'-fluoro-nucleotide
  modified_base (12)..(12): 2'-fluoro-nucleotide
  modified_base (13)..(13): 2'-OMe-nucleotide
  modified_base (14)..(14): 2'-OMe-nucleotide
  modified_base (15)..(15): 2'-OMe-nucleotide
  modified_base (16)..(16): 2'-OMe-nucleotide
  modified_base (17)..(17): 2'-OMe-nucleotide
  modified_base (18)..(18): 2'-OMe-nucleotide
  modified_base (19)..(19): 2'-OMe-nucleotide
  modified_base (20)..(20): 2'-OMe-nucleotide
  misc_feature (20)..(21): /note="phosphorothioate bond"
  modified_base (21)..(21): Locked nucleic acid (LNA) nucleotide
  misc_feature (21)..(22): /note="phosphorothioate bond"
  modified_base (22)..(22): Locked nucleic acid (LNA) nucleotide
tttggacggaguuaucgaggtt

SEQ ID NO: 1320 - DNA, 22 bp, Artificial Sequence
  source: /note="Description of Artificial Sequence: Synthetic oligonucleotide"
  source: /note="Description of Combined DNA/RNA Molecule: Synthetic oligonucleotide"
  modified_base (1)..(1): GalNAc-morpholino-thymidine analog 3
  misc_feature (1)..(2): /note="phosphorothioate bond"
  modified_base (2)..(2): GalNAc-morpholino-thymidine analog 3
  misc_feature (2)..(3): /note="phosphorothioate bond"
  modified_base (3)..(3): GalNAc-morpholino-thymidine analog 3
  modified_base (4)..(4): 2'-OMe-nucleotide
  modified_base (5)..(5): 2'-OMe-nucleotide
  modified_base (6)..(6): 2'-OMe-nucleotide
  modified_base (7)..(7): 2'-OMe-nucleotide
  modified_base (8)..(8): 2'-fluoro-nucleotide
  modified_base (9)..(9): 2'-OMe-nucleotide
  modified_base (10)..(10): 2'-fluoro-nucleotide
  modified_base (11)..(11): 2'-fluoro-nucleotide
  modified_base (12)..(12): 2'-fluoro-nucleotide
  modified_base (13)..(13): 2'-OMe-nucleotide
  modified_base (14)..(14): 2'-OMe-nucleotide
  modified_base (15)..(15): 2'-OMe-nucleotide
  modified_base (16)..(16): 2'-OMe-nucleotide
  modified_base (17)..(17): 2'-OMe-nucleotide
  modified_base (18)..(18): 2'-OMe-nucleotide
  modified_base (19)..(19): 2'-OMe-nucleotide
  modified_base (20)..(20): 2'-OMe-nucleotide
  misc_feature (20)..(21): /note="phosphorothioate bond"
  modified_base (21)..(21): Locked nucleic acid (LNA) nucleotide
  misc_feature (21)..(22): /note="phosphorothioate bond"
  modified_base (22)..(22): Locked nucleic acid (LNA) nucleotide
tttggacggaguuaucgaggtt

SEQ ID NO: 1321 - DNA, 22 bp, Artificial Sequence
  source: /note="Description of Artificial Sequence: Synthetic oligonucleotide"
  source: /note="Description of Combined DNA/RNA Molecule: Synthetic oligonucleotide"
  modified_base (1)..(1): GalNAc-morpholino-thymidine analog 3
  misc_feature (1)..(2): /note="phosphorothioate bond"
  modified_base (2)..(2): GalNAc-morpholino-thymidine analog 3
  misc_feature (2)..(3): /note="phosphorothioate bond"
  modified_base (3)..(3): GalNAc-morpholino-thymidine analog 3
  modified_base (4)..(4): 2'-OMe-nucleotide
  modified_base (5)..(5): 2'-OMe-nucleotide
  modified_base (6)..(6): 2'-OMe-nucleotide
  modified_base (7)..(7): 2'-OMe-nucleotide
  modified_base (8)..(8): 2'-fluoro-nucleotide
  modified_base (9)..(9): 2'-OMe-nucleotide
  modified_base (10)..(10): 2'-fluoro-nucleotide
  modified_base (11)..(11): 2'-fluoro-nucleotide
  modified_base (12)..(12): 2'-fluoro-nucleotide
  modified_base (13)..(13): 2'-OMe-nucleotide
  modified_base (14)..(14): 2'-OMe-nucleotide
  modified_base (15)..(15): 2'-OMe-nucleotide
  modified_base (16)..(16): 2'-OMe-nucleotide
  modified_base (17)..(17): 2'-OMe-nucleotide
  modified_base (18)..(18): 2'-OMe-nucleotide
  modified_base (19)..(19): 2'-OMe-nucleotide
  modified_base (20)..(20): 2'-OMe-nucleotide
  misc_feature (20)..(21): /note="phosphorothioate bond"
  modified_base (21)..(21): Locked nucleic acid (LNA) nucleotide
  misc_feature (21)..(22): /note="phosphorothioate bond"
  modified_base (22)..(22): Locked nucleic acid (LNA) nucleotide
tttggacggaguuaucgaggtt

SEQ ID NO: 1322 - DNA, 22 bp, Artificial Sequence
  source: /note="Description of Artificial Sequence: Synthetic oligonucleotide"
  source: /note="Description of Combined DNA/RNA Molecule: Synthetic oligonucleotide"
  modified_base (1)..(1): GalNAc-morpholino-thymidine analog 3
  misc_feature (1)..(2): /note="phosphorothioate bond"
  modified_base (2)..(2): GalNAc-morpholino-thymidine analog 3
  misc_feature (2)..(3): /note="phosphorothioate bond"
  modified_base (3)..(3): GalNAc-morpholino-thymidine analog 3
  modified_base (4)..(4): 2'-OMe-nucleotide
  modified_base (5)..(5): 2'-OMe-nucleotide
  modified_base (6)..(6): 2'-OMe-nucleotide
  modified_base (7)..(7): 2'-OMe-nucleotide
  modified_base (8)..(8): 2'-fluoro-nucleotide
  modified_base (9)..(9): 2'-OMe-nucleotide
  modified_base (10)..(10): 2'-fluoro-nucleotide
  modified_base (11)..(11): 2'-fluoro-nucleotide
  modified_base (12)..(12): 2'-fluoro-nucleotide
  modified_base (13)..(13): 2'-OMe-nucleotide
  modified_base (14)..(14): 2'-OMe-nucleotide
  modified_base (15)..(15): 2'-OMe-nucleotide
  modified_base (16)..(16): 2'-OMe-nucleotide
  modified_base (17)..(17): 2'-OMe-nucleotide
  modified_base (18)..(18): 2'-OMe-nucleotide
  modified_base (19)..(19): 2'-OMe-nucleotide
  modified_base (20)..(20): 2'-OMe-nucleotide
  misc_feature (20)..(21): /note="phosphorothioate bond"
  modified_base (21)..(21): Locked nucleic acid (LNA) nucleotide
  misc_feature (21)..(22): /note="phosphorothioate bond"
  modified_base (22)..(22): Locked nucleic acid (LNA) nucleotide
tttggacggaguuaucgaggtt

SEQ ID NO: 1323 - DNA, 22 bp, Artificial Sequence
  source: /note="Description of Artificial Sequence: Synthetic oligonucleotide"
  source: /note="Description of Combined DNA/RNA Molecule: Synthetic oligonucleotide"
  modified_base (1)..(1): GalNAc-morpholino-thymidine analog 3
  misc_feature (1)..(2): /note="phosphorothioate bond"
  modified_base (2)..(2): GalNAc-morpholino-thymidine analog 3
  misc_feature (2)..(3): /note="phosphorothioate bond"
  modified_base (3)..(3): GalNAc-morpholino-thymidine analog 3
  modified_base (4)..(4): 2'-OMe-nucleotide
  modified_base (5)..(5): 2'-OMe-nucleotide
  modified_base (6)..(6): 2'-OMe-nucleotide
  modified_base (7)..(7): 2'-OMe-nucleotide
  modified_base (8)..(8): 2'-fluoro-nucleotide
  modified_base (9)..(9): 2'-OMe-nucleotide
  modified_base (10)..(10): 2'-fluoro-nucleotide
  modified_base (11)..(11): 2'-fluoro-nucleotide
  modified_base (12)..(12): 2'-fluoro-nucleotide
  modified_base (13)..(13): 2'-OMe-nucleotide
  modified_base (14)..(14): 2'-OMe-nucleotide
  modified_base (15)..(15): 2'-OMe-nucleotide
  modified_base (16)..(16): 2'-OMe-nucleotide
  modified_base (17)..(17): 2'-OMe-nucleotide
  modified_base (18)..(18): 2'-OMe-nucleotide
  modified_base (19)..(19): 2'-OMe-nucleotide
  modified_base (20)..(20): 2'-OMe-nucleotide
  misc_feature (20)..(21): /note="phosphorothioate bond"
  modified_base (21)..(21): Locked nucleic acid (LNA) nucleotide
  misc_feature (21)..(22): /note="phosphorothioate bond"
  modified_base (22)..(22): Locked nucleic acid (LNA) nucleotide
tttggacggaguuaucgaggtt

SEQ ID NO: 1324 - DNA, 22 bp, Artificial Sequence
  source: /note="Description of Artificial Sequence: Synthetic oligonucleotide"
  source: /note="Description of Combined DNA/RNA Molecule: Synthetic oligonucleotide"
  modified_base (1)..(1): GalNAc-morpholino-thymidine analog 3
  misc_feature (1)..(2): /note="phosphorothioate bond"
  modified_base (2)..(2): GalNAc-morpholino-thymidine analog 3
  misc_feature (2)..(3): /note="phosphorothioate bond"
  modified_base (3)..(3): GalNAc-morpholino-thymidine analog 3
  modified_base (4)..(4): 2'-OMe-nucleotide
  modified_base (5)..(5): 2'-OMe-nucleotide
  modified_base (6)..(6): 2'-OMe-nucleotide
  modified_base (7)..(7): 2'-OMe-nucleotide
  modified_base (8)..(8): 2'-fluoro-nucleotide
  modified_base (9)..(9): 2'-OMe-nucleotide
  modified_base (10)..(10): 2'-fluoro-nucleotide
  modified_base (11)..(11): 2'-fluoro-nucleotide
  modified_base (12)..(12): 2'-fluoro-nucleotide
  modified_base (13)..(13): 2'-OMe-nucleotide
  modified_base (14)..(14): 2'-OMe-nucleotide
  modified_base (15)..(15): 2'-OMe-nucleotide
  modified_base (16)..(16): 2'-OMe-nucleotide
  modified_base (17)..(17): 2'-OMe-nucleotide
  modified_base (18)..(18): 2'-OMe-nucleotide
  modified_base (19)..(19): 2'-OMe-nucleotide
  modified_base (20)..(20): 2'-OMe-nucleotide
  misc_feature (20)..(21): /note="phosphorothioate bond"
  modified_base (21)..(21): Locked nucleic acid (LNA) nucleotide
  misc_feature (21)..(22): /note="phosphorothioate bond"
  modified_base (22)..(22): Locked nucleic acid (LNA) nucleotide
tttggacggaguuaucgaggtt

SEQ ID NO: 1325 - DNA, 22 bp, Artificial Sequence
  source: /note="Description of Artificial Sequence: Synthetic oligonucleotide"
  source: /note="Description of Combined DNA/RNA Molecule: Synthetic oligonucleotide"
  modified_base (1)..(1): GalNAc-morpholino-thymidine analog 3
  modified_base (2)..(2): GalNAc-morpholino-thymidine analog 3
  modified_base (3)..(3): GalNAc-morpholino-thymidine analog 3
  modified_base (4)..(4): Locked nucleic acid (LNA) nucleotide
  modified_base (5)..(5): Locked nucleic acid (LNA) nucleotide
  modified_base (6)..(6): 2'-OMe-nucleotide
  modified_base (7)..(7): 2'-OMe-nucleotide
  modified_base (8)..(8): 2'-fluoro-nucleotide
  modified_base (9)..(9): 2'-OMe-nucleotide
  modified_base (10)..(10): 2'-fluoro-nucleotide
  modified_base (11)..(11): 2'-fluoro-nucleotide
  modified_base (12)..(12): 2'-fluoro-nucleotide
  modified_base (13)..(13): 2'-OMe-nucleotide
  modified_base (14)..(14): 2'-OMe-nucleotide
  modified_base (15)..(15): 2'-OMe-nucleotide
  modified_base (16)..(16): 2'-OMe-nucleotide
  modified_base (17)..(17): 2'-OMe-nucleotide
  modified_base (18)..(18): 2'-OMe-nucleotide
  modified_base (19)..(19): 2'-OMe-nucleotide
  modified_base (20)..(20): 2'-OMe-nucleotide
  modified_base (21)..(21): Locked nucleic acid (LNA) nucleotide
  modified_base (22)..(22): Locked nucleic acid (LNA) nucleotide
tttggacggaguuaucgaggtt

SEQ ID NO: 1326 - DNA, 22 bp, Artificial Sequence
  source: /note="Description of Artificial Sequence: Synthetic oligonucleotide"
  source: /note="Description of Combined DNA/RNA Molecule: Synthetic oligonucleotide"
  modified_base (1)..(1): GalNAc-morpholino-thymidine analog 3
  modified_base (2)..(2): GalNAc-morpholino-thymidine analog 3
  modified_base (3)..(3): GalNAc-morpholino-thymidine analog 3
  modified_base (4)..(4): Locked nucleic acid (LNA) nucleotide
  modified_base (5)..(5): Locked nucleic acid (LNA) nucleotide
  modified_base (6)..(6): 2'-OMe-nucleotide
  modified_base (7)..(7): 2'-OMe-nucleotide
  modified_base (8)..(8): 2'-fluoro-nucleotide
  modified_base (9)..(9): 2'-OMe-nucleotide
  modified_base (10)..(10): 2'-fluoro-nucleotide
  modified_base (11)..(11): 2'-fluoro-nucleotide
  modified_base (12)..(12): 2'-fluoro-nucleotide
  modified_base (13)..(13): 2'-OMe-nucleotide
  modified_base (14)..(14): 2'-OMe-nucleotide
  modified_base (15)..(15): 2'-OMe-nucleotide
  modified_base (16)..(16): 2'-OMe-nucleotide
  modified_base (17)..(17): 2'-OMe-nucleotide
  modified_base (18)..(18): 2'-OMe-nucleotide
  modified_base (19)..(19): 2'-OMe-nucleotide
  modified_base (20)..(20): 2'-OMe-nucleotide
  modified_base (21)..(21): Locked nucleic acid (LNA) nucleotide
  modified_base (22)..(22): Locked nucleic acid (LNA) nucleotide
tttggacggaguuaucgaggtt

SEQ ID NO: 1327 - DNA, 22 bp, Artificial Sequence
  source: /note="Description of Artificial Sequence: Synthetic oligonucleotide"
  source: /note="Description of Combined DNA/RNA Molecule: Synthetic oligonucleotide"
  modified_base (1)..(1): GalNAc-morpholino-thymidine analog 3
  modified_base (2)..(2): GalNAc-morpholino-thymidine analog 3
  modified_base (3)..(3): GalNAc-morpholino-thymidine analog 3
  modified_base (4)..(4): Locked nucleic acid (LNA) nucleotide
  modified_base (5)..(5): Locked nucleic acid (LNA) nucleotide
  modified_base (6)..(6): 2'-OMe-nucleotide
  modified_base (7)..(7): 2'-OMe-nucleotide
  modified_base (8)..(8): 2'-fluoro-nucleotide
  modified_base (9)..(9): 2'-OMe-nucleotide
  modified_base (10)..(10): 2'-fluoro-nucleotide
  modified_base (11)..(11): 2'-fluoro-nucleotide
  modified_base (12)..(12): 2'-fluoro-nucleotide
  modified_base (13)..(13): 2'-OMe-nucleotide
  modified_base (14)..(14): 2'-OMe-nucleotide
  modified_base (15)..(15): 2'-OMe-nucleotide
  modified_base (16)..(16): 2'-OMe-nucleotide
  modified_base (17)..(17): 2'-OMe-nucleotide
  modified_base (18)..(18): 2'-OMe-nucleotide
  modified_base (19)..(19): 2'-OMe-nucleotide
  modified_base (20)..(20): 2'-OMe-nucleotide
  modified_base (21)..(21): Locked nucleic acid (LNA) nucleotide
  modified_base (22)..(22): Locked nucleic acid (LNA) nucleotide
tttggacggaguuaucgaggtt

SEQ ID NO: 1328 - DNA, 22 bp, Artificial Sequence
  source: /note="Description of Artificial Sequence: Synthetic oligonucleotide"
  source: /note="Description of Combined DNA/RNA Molecule: Synthetic oligonucleotide"
  modified_base (1)..(1): GalNAc-morpholino-thymidine analog 3
  modified_base (2)..(2): GalNAc-morpholino-thymidine analog 3
  modified_base (3)..(3): GalNAc-morpholino-thymidine analog 3
  modified_base (4)..(4): Locked nucleic acid (LNA) nucleotide
  modified_base (5)..(5): Locked nucleic acid (LNA) nucleotide
  modified_base (6)..(6): 2'-OMe-nucleotide
  modified_base (7)..(7): 2'-OMe-nucleotide
  modified_base (8)..(8): 2'-fluoro-nucleotide
  modified_base (9)..(9): 2'-OMe-nucleotide
  modified_base (10)..(10): 2'-fluoro-nucleotide
  modified_base (11)..(11): 2'-fluoro-nucleotide
  modified_base (12)..(12): 2'-fluoro-nucleotide
  modified_base (13)..(13): 2'-OMe-nucleotide
  modified_base (14)..(14): 2'-OMe-nucleotide
  modified_base (15)..(15): 2'-OMe-nucleotide
  modified_base (16)..(16): 2'-OMe-nucleotide
  modified_base (17)..(17): 2'-OMe-nucleotide
  modified_base (18)..(18): 2'-OMe-nucleotide
  modified_base (19)..(19): 2'-OMe-nucleotide
  modified_base (20)..(20): 2'-OMe-nucleotide
  modified_base (21)..(21): Locked nucleic acid (LNA) nucleotide
  modified_base (22)..(22): Locked nucleic acid (LNA) nucleotide
tttggacggaguuaucgaggtt

SEQ ID NO: 1329 - DNA, 22 bp, Artificial Sequence
  source: /note="Description of Artificial Sequence: Synthetic oligonucleotide"
  source: /note="Description of Combined DNA/RNA Molecule: Synthetic oligonucleotide"
  modified_base (1)..(1): GalNAc-morpholino-thymidine analog 3
  modified_base (2)..(2): GalNAc-morpholino-thymidine analog 3
  modified_base (3)..(3): GalNAc-morpholino-thymidine analog 3
  modified_base (4)..(4): Locked nucleic acid (LNA) nucleotide
  modified_base (5)..(5): Locked nucleic acid (LNA) nucleotide
  modified_base (6)..(6): 2'-OMe-nucleotide
  modified_base (7)..(7): 2'-OMe-nucleotide
  modified_base (8)..(8): 2'-fluoro-nucleotide
  modified_base (9)..(9): 2'-OMe-nucleotide
  modified_base (10)..(10): 2'-fluoro-nucleotide
  modified_base (11)..(11): 2'-fluoro-nucleotide
  modified_base (12)..(12): 2'-fluoro-nucleotide
  modified_base (13)..(13): 2'-OMe-nucleotide
  modified_base (14)..(14): 2'-OMe-nucleotide
  modified_base (15)..(15): 2'-OMe-nucleotide
  modified_base (16)..(16): 2'-OMe-nucleotide
  modified_base (17)..(17): 2'-OMe-nucleotide
  modified_base (18)..(18): 2'-OMe-nucleotide
  modified_base (19)..(19): 2'-OMe-nucleotide
  modified_base (20)..(20): 2'-OMe-nucleotide
  modified_base (21)..(21): Locked nucleic acid (LNA) nucleotide
  modified_base (22)..(22): Locked nucleic acid (LNA) nucleotide
tttggacggaguuaucgaggtt

SEQ ID NO: 1330 - DNA, 22 bp, Artificial Sequence
  source: /note="Description of Artificial Sequence: Synthetic oligonucleotide"
  source: /note="Description of Combined DNA/RNA Molecule: Synthetic oligonucleotide"
  modified_base (1)..(1): GalNAc-morpholino-thymidine analog 3
  misc_feature (1)..(2): /note="phosphorothioate bond"
  modified_base (2)..(2): GalNAc-morpholino-thymidine analog 3
  misc_feature (2)..(3): /note="phosphorothioate bond"
  modified_base (3)..(3): GalNAc-morpholino-thymidine analog 3
  modified_base (4)..(4): Locked nucleic acid (LNA) nucleotide
  modified_base (5)..(5): Locked nucleic acid (LNA) nucleotide
  modified_base (6)..(6): 2'-OMe-nucleotide
  modified_base (7)..(7): 2'-OMe-nucleotide
  modified_base (8)..(8): 2'-fluoro-nucleotide
  modified_base (9)..(9): 2'-OMe-nucleotide
  modified_base (10)..(10): 2'-fluoro-nucleotide
  modified_base (11)..(11): 2'-fluoro-nucleotide
  modified_base (12)..(12): 2'-fluoro-nucleotide
  modified_base (13)..(13): 2'-OMe-nucleotide
  modified_base (14)..(14): 2'-OMe-nucleotide
  modified_base (15)..(15): 2'-OMe-nucleotide
  modified_base (16)..(16): 2'-OMe-nucleotide
  modified_base (17)..(17): 2'-OMe-nucleotide
  modified_base (18)..(18): 2'-OMe-nucleotide
  modified_base (19)..(19): 2'-OMe-nucleotide
  modified_base (20)..(20): 2'-OMe-nucleotide
  misc_feature (20)..(21): /note="phosphorothioate bond"
  modified_base (21)..(21): Locked nucleic acid (LNA) nucleotide
  misc_feature (21)..(22): /note="phosphorothioate bond"
  modified_base (22)..(22): Locked nucleic acid (LNA) nucleotide
tttggacggaguuaucgaggtt

SEQ ID NO: 1331 - DNA, 22 bp, Artificial Sequence
  source: /note="Description of Artificial Sequence: Synthetic oligonucleotide"
  source: /note="Description of Combined DNA/RNA Molecule: Synthetic oligonucleotide"
  modified_base (1)..(1): GalNAc-morpholino-thymidine analog 3
  misc_feature (1)..(2): /note="phosphorothioate bond"
  modified_base (2)..(2): GalNAc-morpholino-thymidine analog 3
  misc_feature (2)..(3): /note="phosphorothioate bond"
  modified_base (3)..(3): GalNAc-morpholino-thymidine analog 3
  modified_base (4)..(4): Locked nucleic acid (LNA) nucleotide
  modified_base (5)..(5): Locked nucleic acid (LNA) nucleotide
  modified_base (6)..(6): 2'-OMe-nucleotide
  modified_base (7)..(7): 2'-OMe-nucleotide
  modified_base (8)..(8): 2'-fluoro-nucleotide
  modified_base (9)..(9): 2'-OMe-nucleotide
  modified_base (10)..(10): 2'-fluoro-nucleotide
  modified_base (11)..(11): 2'-fluoro-nucleotide
  modified_base (12)..(12): 2'-fluoro-nucleotide
  modified_base (13)..(13): 2'-OMe-nucleotide
  modified_base (14)..(14): 2'-OMe-nucleotide
  modified_base (15)..(15): 2'-OMe-nucleotide
  modified_base (16)..(16): 2'-OMe-nucleotide
  modified_base (17)..(17): 2'-OMe-nucleotide
  modified_base (18)..(18): 2'-OMe-nucleotide
  modified_base (19)..(19): 2'-OMe-nucleotide
  modified_base (20)..(20): 2'-OMe-nucleotide
  misc_feature (20)..(21): /note="phosphorothioate bond"
  modified_base (21)..(21): Locked nucleic acid (LNA) nucleotide
  misc_feature (21)..(22): /note="phosphorothioate bond"
  modified_base (22)..(22): Locked nucleic acid (LNA) nucleotide
tttggacggaguuaucgaggtt

SEQ ID NO: 1332 - DNA, 22 bp, Artificial Sequence
  source: /note="Description of Artificial Sequence: Synthetic oligonucleotide"
  source: /note="Description of Combined DNA/RNA Molecule: Synthetic oligonucleotide"
  modified_base (1)..(1): GalNAc-morpholino-thymidine analog 3
  misc_feature (1)..(2): /note="phosphorothioate bond"
  modified_base (2)..(2): GalNAc-morpholino-thymidine analog 3
  misc_feature (2)..(3): /note="phosphorothioate bond"
  modified_base (3)..(3): GalNAc-morpholino-thymidine analog 3
  modified_base (4)..(4): Locked nucleic acid (LNA) nucleotide
  modified_base (5)..(5): Locked nucleic acid (LNA) nucleotide
  modified_base (6)..(6): 2'-OMe-nucleotide
  modified_base (7)..(7): 2'-OMe-nucleotide
  modified_base (8)..(8): 2'-fluoro-nucleotide
  modified_base (9)..(9): 2'-OMe-nucleotide
  modified_base (10)..(10): 2'-fluoro-nucleotide
  modified_base (11)..(11): 2'-fluoro-nucleotide
  modified_base (12)..(12): 2'-fluoro-nucleotide
  modified_base (13)..(13): 2'-OMe-nucleotide
  modified_base (14)..(14): 2'-OMe-nucleotide
  modified_base (15)..(15): 2'-OMe-nucleotide
  modified_base (16)..(16): 2'-OMe-nucleotide
  modified_base (17)..(17): 2'-OMe-nucleotide
  modified_base (18)..(18): 2'-OMe-nucleotide
  modified_base (19)..(19): 2'-OMe-nucleotide
  modified_base (20)..(20): 2'-OMe-nucleotide
  misc_feature (20)..(21): /note="phosphorothioate bond"
  modified_base (21)..(21): Locked nucleic acid (LNA) nucleotide
  misc_feature (21)..(22): /note="phosphorothioate bond"
  modified_base (22)..(22): Locked nucleic acid (LNA) nucleotide
tttggacggaguuaucgaggtt

SEQ ID NO: 1333 - DNA, 22 bp, Artificial Sequence
  source: /note="Description of Artificial Sequence: Synthetic oligonucleotide"
  source: /note="Description of Combined DNA/RNA Molecule: Synthetic oligonucleotide"
  modified_base (1)..(1): GalNAc-morpholino-thymidine analog 3
  misc_feature (1)..(2): /note="phosphorothioate bond"
  modified_base (2)..(2): GalNAc-morpholino-thymidine analog 3
  misc_feature (2)..(3): /note="phosphorothioate bond"
  modified_base (3)..(3): GalNAc-morpholino-thymidine analog 3
  modified_base (4)..(4): Locked nucleic acid (LNA) nucleotide
  modified_base (5)..(5): Locked nucleic acid (LNA) nucleotide
  modified_base (6)..(6): 2'-OMe-nucleotide
  modified_base (7)..(7): 2'-OMe-nucleotide
  modified_base (8)..(8): 2'-fluoro-nucleotide
  modified_base (9)..(9): 2'-OMe-nucleotide
  modified_base (10)..(10): 2'-fluoro-nucleotide
  modified_base (11)..(11): 2'-fluoro-nucleotide
  modified_base (12)..(12): 2'-fluoro-nucleotide
  modified_base (13)..(13): 2'-OMe-nucleotide
  modified_base (14)..(14): 2'-OMe-nucleotide
  modified_base (15)..(15): 2'-OMe-nucleotide
  modified_base (16)..(16): 2'-OMe-nucleotide
  modified_base (17)..(17): 2'-OMe-nucleotide
  modified_base (18)..(18): 2'-OMe-nucleotide
  modified_base (19)..(19): 2'-OMe-nucleotide
  modified_base (20)..(20): 2'-OMe-nucleotide
  misc_feature (20)..(21): /note="phosphorothioate bond"
  modified_base (21)..(21): Locked nucleic acid (LNA) nucleotide
  misc_feature (21)..(22): /note="phosphorothioate bond"
  modified_base (22)..(22): Locked nucleic acid (LNA) nucleotide
tttggacggaguuaucgaggtt

SEQ ID NO: 1334 - DNA, 22 bp, Artificial Sequence
  source: /note="Description of Artificial Sequence: Synthetic oligonucleotide"
  source: /note="Description of Combined DNA/RNA Molecule: Synthetic oligonucleotide"
  modified_base (1)..(1): GalNAc-morpholino-thymidine analog 3
  misc_feature (1)..(2): /note="phosphorothioate bond"
  modified_base (2)..(2): GalNAc-morpholino-thymidine analog 3
  misc_feature (2)..(3): /note="phosphorothioate bond"
  modified_base (3)..(3): GalNAc-morpholino-thymidine analog 3
  modified_base (4)..(4): Locked nucleic acid (LNA) nucleotide
  modified_base (5)..(5): Locked nucleic acid (LNA) nucleotide
  modified_base (6)..(6): 2'-OMe-nucleotide
  modified_base (7)..(7): 2'-OMe-nucleotide
  modified_base (8)..(8): 2'-fluoro-nucleotide
  modified_base (9)..(9): 2'-OMe-nucleotide
  modified_base (10)..(10): 2'-fluoro-nucleotide
  modified_base (11)..(11): 2'-fluoro-nucleotide
  modified_base (12)..(12): 2'-fluoro-nucleotide
  modified_base (13)..(13): 2'-OMe-nucleotide
  modified_base (14)..(14): 2'-OMe-nucleotide
  modified_base (15)..(15): 2'-OMe-nucleotide
  modified_base (16)..(16): 2'-OMe-nucleotide
  modified_base (17)..(17): 2'-OMe-nucleotide
  modified_base (18)..(18): 2'-OMe-nucleotide
  modified_base (19)..(19): 2'-OMe-nucleotide
  modified_base (20)..(20): 2'-OMe-nucleotide
  misc_feature (20)..(21): /note="phosphorothioate bond"
  modified_base (21)..(21): Locked nucleic acid (LNA) nucleotide
  misc_feature (21)..(22): /note="phosphorothioate bond"
  modified_base (22)..(22): Locked nucleic acid (LNA) nucleotide
tttggacggaguuaucgaggtt

SEQ ID NO: 1335 - DNA, 24 bp, Artificial Sequence
  source: /note="Description of Artificial Sequence: Synthetic oligonucleotide"
  source: /note="Description of Combined DNA/RNA Molecule: Synthetic oligonucleotide"
  modified_base (1)..(1): GalNAc-morpholino-thymidine analog 3
  modified_base (2)..(2): GalNAc-morpholino-thymidine analog 3
  modified_base (3)..(3): GalNAc-morpholino-thymidine analog 3
  modified_base (4)..(4): 2'-OMe-nucleotide
  modified_base (5)..(5): 2'-OMe-nucleotide
  modified_base (6)..(6): 2'-OMe-nucleotide
  modified_base (7)..(7): 2'-OMe-nucleotide
  modified_base (8)..(8): 2'-fluoro-nucleotide
  modified_base (9)..(9): 2'-OMe-nucleotide
  modified_base (10)..(10): 2'-fluoro-nucleotide
  modified_base (11)..(11): 2'-fluoro-nucleotide
  modified_base (12)..(12): 2'-fluoro-nucleotide
  modified_base (13)..(13): 2'-OMe-nucleotide
  modified_base (14)..(14): 2'-OMe-nucleotide
  modified_base (15)..(15): 2'-OMe-nucleotide
  modified_base (16)..(16): 2'-OMe-nucleotide
  modified_base (17)..(17): 2'-OMe-nucleotide
  modified_base (18)..(18): 2'-OMe-nucleotide
  modified_base (19)..(19): 2'-OMe-nucleotide
  modified_base (20)..(20): 2'-OMe-nucleotide
  modified_base (21)..(21): 2'-OMe-nucleotide
  modified_base (22)..(22): 2'-OMe-nucleotide
  modified_base (23)..(23): Locked nucleic acid (LNA) nucleotide
  modified_base (24)..(24): Locked nucleic acid (LNA) nucleotide
tttggacggaguuaucgaggcatt

SEQ ID NO: 1336 - DNA, 24 bp, Artificial Sequence
  source: /note="Description of Artificial Sequence: Synthetic oligonucleotide"
  source: /note="Description of Combined DNA/RNA Molecule: Synthetic oligonucleotide"
  modified_base (1)..(1): GalNAc-morpholino-thymidine analog 3
  modified_base (2)..(2): GalNAc-morpholino-thymidine analog 3
  modified_base (3)..(3): GalNAc-morpholino-thymidine analog 3
  modified_base (4)..(4): 2'-OMe-nucleotide
  modified_base (5)..(5): 2'-OMe-nucleotide
  modified_base (6)..(6): 2'-OMe-nucleotide
  modified_base (7)..(7): 2'-OMe-nucleotide
  modified_base (8)..(8): 2'-fluoro-nucleotide
  modified_base (9)..(9): 2'-OMe-nucleotide
  modified_base (10)..(10): 2'-fluoro-nucleotide
  modified_base (11)..(11): 2'-fluoro-nucleotide
  modified_base (12)..(12): 2'-fluoro-nucleotide
  modified_base (13)..(13): 2'-OMe-nucleotide
  modified_base (14)..(14): 2'-OMe-nucleotide
  modified_base (15)..(15): 2'-OMe-nucleotide
  modified_base (16)..(16): 2'-OMe-nucleotide
  modified_base (17)..(17): 2'-OMe-nucleotide
  modified_base (18)..(18): 2'-OMe-nucleotide
  modified_base (19)..(19): 2'-OMe-nucleotide
  modified_base (20)..(20): 2'-OMe-nucleotide
  modified_base (21)..(21): 2'-OMe-nucleotide
  modified_base (22)..(22): 2'-OMe-nucleotide
  modified_base (23)..(23): Locked nucleic acid (LNA) nucleotide
  modified_base (24)..(24): Locked nucleic acid (LNA) nucleotide
tttggacggaguuaucgaggcatt

SEQ ID NO: 1337 - DNA, 24 bp, Artificial Sequence
  source: /note="Description of Artificial Sequence: Synthetic oligonucleotide"
  source: /note="Description of Combined DNA/RNA Molecule: Synthetic oligonucleotide"
  modified_base (1)..(1): GalNAc-morpholino-thymidine analog 3
  modified_base (2)..(2): GalNAc-morpholino-thymidine analog 3
  modified_base (3)..(3): GalNAc-morpholino-thymidine analog 3
  modified_base (4)..(4): 2'-OMe-nucleotide
  modified_base (5)..(5): 2'-OMe-nucleotide
  modified_base (6)..(6): 2'-OMe-nucleotide
  modified_base (7)..(7): 2'-OMe-nucleotide
  modified_base (8)..(8): 2'-fluoro-nucleotide
  modified_base (9)..(9): 2'-OMe-nucleotide
  modified_base (10)..(10): 2'-fluoro-nucleotide
  modified_base (11)..(11): 2'-fluoro-nucleotide
  modified_base (12)..(12): 2'-fluoro-nucleotide
  modified_base (13)..(13): 2'-OMe-nucleotide
  modified_base (14)..(14): 2'-OMe-nucleotide
  modified_base (15)..(15): 2'-OMe-nucleotide
  modified_base (16)..(16): 2'-OMe-nucleotide
  modified_base (17)..(17): 2'-OMe-nucleotide
  modified_base (18)..(18): 2'-OMe-nucleotide
  modified_base (19)..(19): 2'-OMe-nucleotide
  modified_base (20)..(20): 2'-OMe-nucleotide
  modified_base (21)..(21): 2'-OMe-nucleotide
  modified_base (22)..(22): 2'-OMe-nucleotide
  modified_base (23)..(23): Locked nucleic acid (LNA) nucleotide
  modified_base (24)..(24): Locked nucleic acid (LNA) nucleotide
tttggacggaguuaucgaggcatt

SEQ ID NO: 1338 - DNA, 24 bp, Artificial Sequence
  source: /note="Description of Artificial Sequence: Synthetic oligonucleotide"
  source: /note="Description of Combined DNA/RNA Molecule: Synthetic oligonucleotide"
  modified_base (1)..(1): GalNAc-morpholino-thymidine analog 3
  modified_base (2)..(2): GalNAc-morpholino-thymidine analog 3
  modified_base (3)..(3): GalNAc-morpholino-thymidine analog 3
  modified_base (4)..(4): 2'-OMe-nucleotide
  modified_base (5)..(5): 2'-OMe-nucleotide
  modified_base (6)..(6): 2'-OMe-nucleotide
  modified_base (7)..(7): 2'-OMe-nucleotide
  modified_base (8)..(8): 2'-fluoro-nucleotide
  modified_base (9)..(9): 2'-OMe-nucleotide
  modified_base (10)..(10): 2'-fluoro-nucleotide
  modified_base (11)..(11): 2'-fluoro-nucleotide
  modified_base (12)..(12): 2'-fluoro-nucleotide
  modified_base (13)..(13): 2'-OMe-nucleotide
  modified_base (14)..(14): 2'-OMe-nucleotide
  modified_base (15)..(15): 2'-OMe-nucleotide
  modified_base (16)..(16): 2'-OMe-nucleotide
  modified_base (17)..(17): 2'-OMe-nucleotide
  modified_base (18)..(18): 2'-OMe-nucleotide
  modified_base (19)..(19): 2'-OMe-nucleotide
  modified_base (20)..(20): 2'-OMe-nucleotide
  modified_base (21)..(21): 2'-OMe-nucleotide
  modified_base (22)..(22): 2'-OMe-nucleotide
  modified_base (23)..(23): Locked nucleic acid (LNA) nucleotide
  modified_base (24)..(24): Locked nucleic acid (LNA) nucleotide
tttggacggaguuaucgaggcatt

SEQ ID NO: 1339 - DNA, 24 bp, Artificial Sequence
  source: /note="Description of Artificial Sequence: Synthetic oligonucleotide"
  source: /note="Description of Combined DNA/RNA Molecule: Synthetic oligonucleotide"
  modified_base (1)..(1): GalNAc-morpholino-thymidine analog 3
  modified_base (2)..(2): GalNAc-morpholino-thymidine analog 3
  modified_base (3)..(3): GalNAc-morpholino-thymidine analog 3
  modified_base (4)..(4): 2'-OMe-nucleotide
  modified_base (5)..(5): 2'-OMe-nucleotide
  modified_base (6)..(6): 2'-OMe-nucleotide
  modified_base (7)..(7): 2'-OMe-nucleotide
  modified_base (8)..(8): 2'-fluoro-nucleotide
  modified_base (9)..(9): 2'-OMe-nucleotide
  modified_base (10)..(10): 2'-fluoro-nucleotide
  modified_base (11)..(11): 2'-fluoro-nucleotide
  modified_base (12)..(12): 2'-fluoro-nucleotide
  modified_base (13)..(13): 2'-OMe-nucleotide
  modified_base (14)..(14): 2'-OMe-nucleotide
  modified_base (15)..(15): 2'-OMe-nucleotide
  modified_base (16)..(16): 2'-OMe-nucleotide
  modified_base (17)..(17): 2'-OMe-nucleotide
  modified_base (18)..(18): 2'-OMe-nucleotide
  modified_base (19)..(19): 2'-OMe-nucleotide
  modified_base (20)..(20): 2'-OMe-nucleotide
  modified_base (21)..(21): 2'-OMe-nucleotide
  modified_base (22)..(22): 2'-OMe-nucleotide
  modified_base (23)..(23): Locked nucleic acid (LNA) nucleotide
  modified_base (24)..(24): Locked nucleic acid (LNA) nucleotide
tttggacggaguuaucgaggcatt

SEQ ID NO: 1340 - DNA, 24 bp, Artificial Sequence
  source: /note="Description of Artificial Sequence: Synthetic oligonucleotide"
  source: /note="Description of Combined DNA/RNA Molecule: Synthetic oligonucleotide"
  modified_base (1)..(1): GalNAc-morpholino-thymidine analog 3
  modified_base (2)..(2): GalNAc-morpholino-thymidine analog 3
  modified_base (3)..(3): GalNAc-morpholino-thymidine analog 3
  modified_base (4)..(4): 2'-OMe-nucleotide
  modified_base (5)..(5): 2'-OMe-nucleotide
  modified_base (6)..(6): 2'-OMe-nucleotide
  modified_base (7)..(7): 2'-OMe-nucleotide
  modified_base (8)..(8): 2'-fluoro-nucleotide
  modified_base (9)..(9): 2'-OMe-nucleotide
  modified_base (10)..(10): 2'-fluoro-nucleotide
  modified_base (11)..(11): 2'-fluoro-nucleotide
  modified_base (12)..(12): 2'-fluoro-nucleotide
  modified_base (13)..(13): 2'-OMe-nucleotide
  modified_base (14)..(14): 2'-OMe-nucleotide
  modified_base (15)..(15): 2'-OMe-nucleotide
  modified_base (16)..(16): 2'-OMe-nucleotide
  modified_base (17)..(17): 2'-OMe-nucleotide
  modified_base (18)..(18): 2'-OMe-nucleotide
  modified_base (19)..(19): 2'-OMe-nucleotide
  modified_base (20)..(20): 2'-OMe-nucleotide
  modified_base (21)..(21): 2'-OMe-nucleotide
  modified_base (22)..(22): 2'-OMe-nucleotide
  modified_base (23)..(23): Locked nucleic acid (LNA) nucleotide
  modified_base (24)..(24): Locked nucleic acid (LNA) nucleotide
tttggacggaguuaucgaggcatt

SEQ ID NO: 1341 - DNA, 24 bp, Artificial Sequence
  source: /note="Description of Artificial Sequence: Synthetic oligonucleotide"
  source: /note="Description of Combined DNA/RNA Molecule: Synthetic oligonucleotide"
  modified_base (1)..(1): GalNAc-morpholino-thymidine analog 3
  modified_base (2)..(2): GalNAc-morpholino-thymidine analog 3
  modified_base (3)..(3): GalNAc-morpholino-thymidine analog 3
  modified_base (4)..(4): 2'-OMe-nucleotide
  modified_base (5)..(5): 2'-OMe-nucleotide
  modified_base (6)..(6): 2'-OMe-nucleotide
  modified_base (7)..(7): 2'-OMe-nucleotide
  modified_base (8)..(8): 2'-fluoro-nucleotide
  modified_base (9)..(9): 2'-OMe-nucleotide
  modified_base (10)..(10): 2'-fluoro-nucleotide
  modified_base (11)..(11): 2'-fluoro-nucleotide
  modified_base (12)..(12): 2'-fluoro-nucleotide
  modified_base (13)..(13): 2'-OMe-nucleotide
  modified_base (14)..(14): 2'-OMe-nucleotide
  modified_base (15)..(15): 2'-OMe-nucleotide
  modified_base (16)..(16): 2'-OMe-nucleotide
  modified_base (17)..(17): 2'-OMe-nucleotide
  modified_base (18)..(18): 2'-OMe-nucleotide
  modified_base (19)..(19): 2'-OMe-nucleotide
  modified_base (20)..(20): 2'-OMe-nucleotide
  modified_base (21)..(21): 2'-OMe-nucleotide
  modified_base (22)..(22): 2'-OMe-nucleotide
  modified_base (23)..(23): Locked nucleic acid (LNA) nucleotide
  modified_base (24)..(24): Locked nucleic acid (LNA) nucleotide
tttggacggaguuaucgaggcatt

SEQ ID NO: 1342 - DNA, 24 bp, Artificial Sequence
  source: /note="Description of Artificial Sequence: Synthetic oligonucleotide"
  source: /note="Description of Combined DNA/RNA Molecule: Synthetic oligonucleotide"
  modified_base (1)..(1): GalNAc-morpholino-thymidine analog 3
  modified_base (2)..(2): GalNAc-morpholino-thymidine analog 3
  modified_base (3)..(3): GalNAc-morpholino-thymidine analog 3
  modified_base (4)..(4): 2'-OMe-nucleotide
  modified_base (5)..(5): 2'-OMe-nucleotide
  modified_base (6)..(6): 2'-OMe-nucleotide
  modified_base (7)..(7): 2'-OMe-nucleotide
  modified_base (8)..(8): 2'-fluoro-nucleotide
  modified_base (9)..(9): 2'-OMe-nucleotide
  modified_base (10)..(10): 2'-fluoro-nucleotide
  modified_base (11)..(11): 2'-fluoro-nucleotide
  modified_base (12)..(12): 2'-fluoro-nucleotide
  modified_base (13)..(13): 2'-OMe-nucleotide
  modified_base (14)..(14): 2'-OMe-nucleotide
  modified_base (15)..(15): 2'-OMe-nucleotide
  modified_base (16)..(16): 2'-OMe-nucleotide
  modified_base (17)..(17): 2'-OMe-nucleotide
  modified_base (18)..(18): 2'-OMe-nucleotide
  modified_base (19)..(19): 2'-OMe-nucleotide
  modified_base (20)..(20): 2'-OMe-nucleotide
  modified_base (21)..(21): 2'-OMe-nucleotide
  modified_base (22)..(22): 2'-OMe-nucleotide
  modified_base (23)..(23): Locked nucleic acid (LNA) nucleotide
  modified_base (24)..(24): Locked nucleic acid (LNA) nucleotide
tttggacggaguuaucgaggcatt

SEQ ID NO: 1343 - DNA, 24 bp, Artificial Sequence
  source: /note="Description of Artificial Sequence: Synthetic oligonucleotide"
  source: /note="Description of Combined DNA/RNA Molecule: Synthetic oligonucleotide"
  modified_base (1)..(1): GalNAc-morpholino-thymidine analog 3
  modified_base (2)..(2): GalNAc-morpholino-thymidine analog 3
  modified_base (3)..(3): GalNAc-morpholino-thymidine analog 3
  modified_base (4)..(4): 2'-OMe-nucleotide
  modified_base (5)..(5): 2'-OMe-nucleotide
  modified_base (6)..(6): 2'-OMe-nucleotide
  modified_base (7)..(7): 2'-OMe-nucleotide
  modified_base (8)..(8): 2'-fluoro-nucleotide
  modified_base (9)..(9): 2'-OMe-nucleotide
  modified_base (10)..(10): 2'-fluoro-nucleotide
  modified_base (11)..(11): 2'-fluoro-nucleotide
  modified_base (12)..(12): 2'-fluoro-nucleotide
  modified_base (13)..(13): 2'-OMe-nucleotide
  modified_base (14)..(14): 2'-OMe-nucleotide
  modified_base (15)..(15): 2'-OMe-nucleotide
  modified_base (16)..(16): 2'-OMe-nucleotide
  modified_base (17)..(17): 2'-OMe-nucleotide
  modified_base (18)..(18): 2'-OMe-nucleotide
  modified_base (19)..(19): 2'-OMe-nucleotide
  modified_base (20)..(20): 2'-OMe-nucleotide
  modified_base (21)..(21): 2'-OMe-nucleotide
  modified_base (22)..(22): 2'-OMe-nucleotide
  modified_base (23)..(23): Locked nucleic acid (LNA) nucleotide
  modified_base (24)..(24): Locked nucleic acid (LNA) nucleotide
tttggacggaguuaucgaggcatt

SEQ ID NO: 1344 - DNA, 24 bp, Artificial Sequence
  source: /note="Description of Artificial Sequence: Synthetic oligonucleotide"
  source: /note="Description of Combined DNA/RNA Molecule: Synthetic oligonucleotide"
  modified_base (1)..(1): GalNAc-morpholino-thymidine analog 3
  misc_feature (1)..(2): /note="phosphorothioate bond"
  modified_base (2)..(2): GalNAc-morpholino-thymidine analog 3
  misc_feature (2)..(3): /note="phosphorothioate bond"
  modified_base (3)..(3): GalNAc-morpholino-thymidine analog 3
  modified_base (4)..(4): 2'-OMe-nucleotide
  modified_base (5)..(5): 2'-OMe-nucleotide
  modified_base (6)..(6): 2'-OMe-nucleotide
  modified_base (7)..(7): 2'-OMe-nucleotide
  modified_base (8)..(8): 2'-fluoro-nucleotide
  modified_base (9)..(9): 2'-OMe-nucleotide
  modified_base (10)..(10): 2'-fluoro-nucleotide
  modified_base (11)..(11): 2'-fluoro-nucleotide
  modified_base (12)..(12): 2'-fluoro-nucleotide
  modified_base (13)..(13): 2'-OMe-nucleotide
  modified_base (14)..(14): 2'-OMe-nucleotide
  modified_base (15)..(15): 2'-OMe-nucleotide
  modified_base (16)..(16): 2'-OMe-nucleotide
  modified_base (17)..(17): 2'-OMe-nucleotide
  modified_base (18)..(18): 2'-OMe-nucleotide
  modified_base (19)..(19): 2'-OMe-nucleotide
  modified_base (20)..(20): 2'-OMe-nucleotide
  modified_base (21)..(21): 2'-OMe-nucleotide
  modified_base (22)..(22): 2'-OMe-nucleotide
  misc_feature (22)..(23): /note="phosphorothioate bond"
  modified_base (23)..(23): Locked nucleic acid (LNA) nucleotide
  misc_feature (23)..(24): /note="phosphorothioate bond"
  modified_base (24)..(24): Locked nucleic acid (LNA) nucleotide
tttggacggaguuaucgaggcatt

SEQ ID NO: 1345 - DNA, 24 bp, Artificial Sequence
  source: /note="Description of Artificial Sequence: Synthetic oligonucleotide"
  source: /note="Description of Combined DNA/RNA Molecule: Synthetic oligonucleotide"
  modified_base (1)..(1): GalNAc-morpholino-thymidine analog 3
  misc_feature (1)..(2): /note="phosphorothioate bond"
  modified_base (2)..(2): GalNAc-morpholino-thymidine analog 3
  misc_feature (2)..(3): /note="phosphorothioate bond"
  modified_base (3)..(3): GalNAc-morpholino-thymidine analog 3
  modified_base (4)..(4): 2'-OMe-nucleotide
  modified_base (5)..(5): 2'-OMe-nucleotide
  modified_base (6)..(6): 2'-OMe-nucleotide
  modified_base (7)..(7): 2'-OMe-nucleotide
  modified_base (8)..(8): 2'-fluoro-nucleotide
  modified_base (9)..(9): 2'-OMe-nucleotide
  modified_base (10)..(10): 2'-fluoro-nucleotide
  modified_base (11)..(11): 2'-fluoro-nucleotide
  modified_base (12)..(12): 2'-fluoro-nucleotide
  modified_base (13)..(13): 2'-OMe-nucleotide
  modified_base (14)..(14): 2'-OMe-nucleotide
  modified_base (15)..(15): 2'-OMe-nucleotide
  modified_base (16)..(16): 2'-OMe-nucleotide
  modified_base (17)..(17): 2'-OMe-nucleotide
  modified_base (18)..(18): 2'-OMe-nucleotide
  modified_base (19)..(19): 2'-OMe-nucleotide
  modified_base (20)..(20): 2'-OMe-nucleotide
  modified_base (21)..(21): 2'-OMe-nucleotide
  modified_base (22)..(22): 2'-OMe-nucleotide
  misc_feature (22)..(23): /note="phosphorothioate bond"
  modified_base (23)..(23): Locked nucleic acid (LNA) nucleotide
  misc_feature (23)..(24): /note="phosphorothioate bond"
  modified_base (24)..(24): Locked nucleic acid (LNA) nucleotide
tttggacggaguuaucgaggcatt

SEQ ID NO: 1346 - DNA, 24 bp, Artificial Sequence
  source: /note="Description of Artificial Sequence: Synthetic oligonucleotide"
  source: /note="Description of Combined DNA/RNA Molecule: Synthetic oligonucleotide"
  modified_base (1)..(1): GalNAc-morpholino-thymidine analog 3
  misc_feature (1)..(2): /note="phosphorothioate bond"
  modified_base (2)..(2): GalNAc-morpholino-thymidine analog 3
  misc_feature (2)..(3): /note="phosphorothioate bond"
  modified_base (3)..(3): GalNAc-morpholino-thymidine analog 3
  modified_base (4)..(4): 2'-OMe-nucleotide
  modified_base (5)..(5): 2'-OMe-nucleotide
  modified_base (6)..(6): 2'-OMe-nucleotide
  modified_base (7)..(7): 2'-OMe-nucleotide
  modified_base (8)..(8): 2'-fluoro-nucleotide
  modified_base (9)..(9): 2'-OMe-nucleotide
  modified_base (10)..(10): 2'-fluoro-nucleotide
  modified_base (11)..(11): 2'-fluoro-nucleotide
  modified_base (12)..(12): 2'-fluoro-nucleotide
  modified_base (13)..(13): 2'-OMe-nucleotide
  modified_base (14)..(14): 2'-OMe-nucleotide
  modified_base (15)..(15): 2'-OMe-nucleotide
  modified_base (16)..(16): 2'-OMe-nucleotide
  modified_base (17)..(17): 2'-OMe-nucleotide
  modified_base (18)..(18): 2'-OMe-nucleotide
  modified_base (19)..(19): 2'-OMe-nucleotide
  modified_base (20)..(20): 2'-OMe-nucleotide
  modified_base (21)..(21): 2'-OMe-nucleotide
  modified_base (22)..(22): 2'-OMe-nucleotide
  misc_feature (22)..(23): /note="phosphorothioate bond"
  modified_base (23)..(23): Locked nucleic acid (LNA) nucleotide
  misc_feature (23)..(24): /note="phosphorothioate bond"
  modified_base (24)..(24): Locked nucleic acid (LNA) nucleotide
tttggacggaguuaucgaggcatt

SEQ ID NO: 1347 - DNA, 24 bp, Artificial Sequence
  source: /note="Description of Artificial Sequence: Synthetic oligonucleotide"
  source: /note="Description of Combined DNA/RNA Molecule: Synthetic oligonucleotide"
  modified_base (1)..(1): GalNAc-morpholino-thymidine analog 3
  misc_feature (1)..(2): /note="phosphorothioate bond"
  modified_base (2)..(2): GalNAc-morpholino-thymidine analog 3
  misc_feature (2)..(3): /note="phosphorothioate bond"
  modified_base (3)..(3): GalNAc-morpholino-thymidine analog 3
  modified_base (4)..(4): 2'-OMe-nucleotide
  modified_base (5)..(5): 2'-OMe-nucleotide
  modified_base (6)..(6): 2'-OMe-nucleotide
  modified_base (7)..(7): 2'-OMe-nucleotide
  modified_base (8)..(8): 2'-fluoro-nucleotide
  modified_base (9)..(9): 2'-OMe-nucleotide
  modified_base (10)..(10): 2'-fluoro-nucleotide
  modified_base (11)..(11): 2'-fluoro-nucleotide
  modified_base (12)..(12): 2'-fluoro-nucleotide
  modified_base (13)..(13): 2'-OMe-nucleotide
  modified_base (14)..(14): 2'-OMe-nucleotide
  modified_base (15)..(15): 2'-OMe-nucleotide
  modified_base (16)..(16): 2'-OMe-nucleotide
  modified_base (17)..(17): 2'-OMe-nucleotide
  modified_base (18)..(18): 2'-OMe-nucleotide
  modified_base (19)..(19): 2'-OMe-nucleotide
  modified_base (20)..(20): 2'-OMe-nucleotide
  modified_base (21)..(21): 2'-OMe-nucleotide
  modified_base (22)..(22): 2'-OMe-nucleotide
  misc_feature (22)..(23): /note="phosphorothioate bond"
  modified_base (23)..(23): Locked nucleic acid (LNA) nucleotide
  misc_feature (23)..(24): /note="phosphorothioate bond"
  modified_base (24)..(24): Locked nucleic acid (LNA) nucleotide
tttggacggaguuaucgaggcatt

SEQ ID NO: 1348 - DNA, 24 bp, Artificial Sequence
  source: /note="Description of Artificial Sequence: Synthetic oligonucleotide"
  source: /note="Description of Combined DNA/RNA Molecule: Synthetic oligonucleotide"
  modified_base (1)..(1): GalNAc-morpholino-thymidine analog 3
  misc_feature (1)..(2): /note="phosphorothioate bond"
  modified_base (2)..(2): GalNAc-morpholino-thymidine analog 3
  misc_feature (2)..(3): /note="phosphorothioate bond"
  modified_base (3)..(3): GalNAc-morpholino-thymidine analog 3
  modified_base (4)..(4): 2'-OMe-nucleotide
  modified_base (5)..(5): 2'-OMe-nucleotide
  modified_base (6)..(6): 2'-OMe-nucleotide
  modified_base (7)..(7): 2'-OMe-nucleotide
  modified_base (8)..(8): 2'-fluoro-nucleotide
  modified_base (9)..(9): 2'-OMe-nucleotide
  modified_base (10)..(10): 2'-fluoro-nucleotide
  modified_base (11)..(11): 2'-fluoro-nucleotide
  modified_base (12)..(12): 2'-fluoro-nucleotide
  modified_base (13)..(13): 2'-OMe-nucleotide
  modified_base (14)..(14): 2'-OMe-nucleotide
  modified_base (15)..(15): 2'-OMe-nucleotide
  modified_base (16)..(16): 2'-OMe-nucleotide
  modified_base (17)..(17): 2'-OMe-nucleotide
  modified_base (18)..(18): 2'-OMe-nucleotide
  modified_base (19)..(19): 2'-OMe-nucleotide
  modified_base (20)..(20): 2'-OMe-nucleotide
  modified_base (21)..(21): 2'-OMe-nucleotide
  modified_base (22)..(22): 2'-OMe-nucleotide
  misc_feature (22)..(23): /note="phosphorothioate bond"
  modified_base (23)..(23): Locked nucleic acid (LNA) nucleotide
  misc_feature (23)..(24): /note="phosphorothioate bond"
  modified_base (24)..(24): Locked nucleic acid (LNA) nucleotide
tttggacggaguuaucgaggcatt

SEQ ID NO: 1349 - DNA, 24 bp, Artificial Sequence
  source: /note="Description of Artificial Sequence: Synthetic oligonucleotide"
  source: /note="Description of Combined DNA/RNA Molecule: Synthetic oligonucleotide"
  modified_base (1)..(1): GalNAc-morpholino-thymidine analog 3
  misc_feature (1)..(2): /note="phosphorothioate bond"
  modified_base (2)..(2): GalNAc-morpholino-thymidine analog 3
  misc_feature (2)..(3): /note="phosphorothioate bond"
  modified_base (3)..(3): GalNAc-morpholino-thymidine analog 3
  modified_base (4)..(4): 2'-OMe-nucleotide
  modified_base (5)..(5): 2'-OMe-nucleotide
  modified_base (6)..(6): 2'-OMe-nucleotide
  modified_base (7)..(7): 2'-OMe-nucleotide
  modified_base (8)..(8): 2'-fluoro-nucleotide
  modified_base (9)..(9): 2'-OMe-nucleotide
  modified_base (10)..(10): 2'-fluoro-nucleotide
  modified_base (11)..(11): 2'-fluoro-nucleotide
  modified_base (12)..(12): 2'-fluoro-nucleotide
  modified_base (13)..(13): 2'-OMe-nucleotide
  modified_base (14)..(14): 2'-OMe-nucleotide
  modified_base (15)..(15): 2'-OMe-nucleotide
  modified_base (16)..(16): 2'-OMe-nucleotide
  modified_base (17)..(17): 2'-OMe-nucleotide
  modified_base (18)..(18): 2'-OMe-nucleotide
  modified_base (19)..(19): 2'-OMe-nucleotide
  modified_base (20)..(20): 2'-OMe-nucleotide
  modified_base (21)..(21): 2'-OMe-nucleotide
  modified_base (22)..(22): 2'-OMe-nucleotide
  misc_feature (22)..(23): /note="phosphorothioate bond"
  modified_base (23)..(23): Locked nucleic acid (LNA) nucleotide
  misc_feature (23)..(24): /note="phosphorothioate bond"
  modified_base (24)..(24): Locked nucleic acid (LNA) nucleotide
tttggacggaguuaucgaggcatt

SEQ ID NO: 1350 - DNA, 24 bp, Artificial Sequence
  source: /note="Description of Artificial Sequence: Synthetic oligonucleotide"
  source: /note="Description of Combined DNA/RNA Molecule: Synthetic oligonucleotide"
  modified_base (1)..(1): GalNAc-morpholino-thymidine analog 3
  misc_feature (1)..(2): /note="phosphorothioate bond"
  modified_base (2)..(2): GalNAc-morpholino-thymidine analog 3
  misc_feature (2)..(3): /note="phosphorothioate bond"
  modified_base (3)..(3): GalNAc-morpholino-thymidine analog 3
  modified_base (4)..(4): 2'-OMe-nucleotide
  modified_base (5)..(5): 2'-OMe-nucleotide
  modified_base (6)..(6): 2'-OMe-nucleotide
  modified_base (7)..(7): 2'-OMe-nucleotide
  modified_base (8)..(8): 2'-fluoro-nucleotide
  modified_base (9)..(9): 2'-OMe-nucleotide
  modified_base (10)..(10): 2'-fluoro-nucleotide
  modified_base (11)..(11): 2'-fluoro-nucleotide
  modified_base (12)..(12): 2'-fluoro-nucleotide
  modified_base (13)..(13): 2'-OMe-nucleotide
  modified_base (14)..(14): 2'-OMe-nucleotide
  modified_base (15)..(15): 2'-OMe-nucleotide
  modified_base (16)..(16): 2'-OMe-nucleotide
  modified_base (17)..(17): 2'-OMe-nucleotide
  modified_base (18)..(18): 2'-OMe-nucleotide
  modified_base (19)..(19): 2'-OMe-nucleotide
  modified_base (20)..(20): 2'-OMe-nucleotide
  modified_base (21)..(21): 2'-OMe-nucleotide
  modified_base (22)..(22): 2'-OMe-nucleotide
  misc_feature (22)..(23): /note="phosphorothioate bond"
  modified_base (23)..(23): Locked nucleic acid (LNA) nucleotide
  misc_feature (23)..(24): /note="phosphorothioate bond"
  modified_base (24)..(24): Locked nucleic acid (LNA) nucleotide
tttggacggaguuaucgaggcatt

SEQ ID NO: 1351 - DNA, 24 bp, Artificial Sequence
  source: /note="Description of Artificial Sequence: Synthetic oligonucleotide"
  source: /note="Description of Combined DNA/RNA Molecule: Synthetic oligonucleotide"
  modified_base (1)..(1): GalNAc-morpholino-thymidine analog 3
  misc_feature (1)..(2): /note="phosphorothioate bond"
  modified_base (2)..(2): GalNAc-morpholino-thymidine analog 3
  misc_feature (2)..(3): /note="phosphorothioate bond"
  modified_base (3)..(3): GalNAc-morpholino-thymidine analog 3
  modified_base (4)..(4): 2'-OMe-nucleotide
  modified_base (5)..(5): 2'-OMe-nucleotide
  modified_base (6)..(6): 2'-OMe-nucleotide
  modified_base (7)..(7): 2'-OMe-nucleotide
  modified_base (8)..(8): 2'-fluoro-nucleotide
  modified_base (9)..(9): 2'-OMe-nucleotide
  modified_base (10)..(10): 2'-fluoro-nucleotide
  modified_base (11)..(11): 2'-fluoro-nucleotide
  modified_base (12)..(12): 2'-fluoro-nucleotide
  modified_base (13)..(13): 2'-OMe-nucleotide
  modified_base (14)..(14): 2'-OMe-nucleotide
  modified_base (15)..(15): 2'-OMe-nucleotide
  modified_base (16)..(16): 2'-OMe-nucleotide
  modified_base (17)..(17): 2'-OMe-nucleotide
  modified_base (18)..(18): 2'-OMe-nucleotide
  modified_base (19)..(19): 2'-OMe-nucleotide
  modified_base (20)..(20): 2'-OMe-nucleotide
  modified_base (21)..(21): 2'-OMe-nucleotide
  modified_base (22)..(22): 2'-OMe-nucleotide
  misc_feature (22)..(23): /note="phosphorothioate bond"
  modified_base (23)..(23): Locked nucleic acid (LNA) nucleotide
  misc_feature (23)..(24): /note="phosphorothioate bond"
  modified_base (24)..(24): Locked nucleic acid (LNA) nucleotide
tttggacggaguuaucgaggcatt

SEQ ID NO: 1352 - DNA, 24 bp, Artificial Sequence
  source: /note="Description of Artificial Sequence: Synthetic oligonucleotide"
  source: /note="Description of Combined DNA/RNA Molecule: Synthetic oligonucleotide"
  modified_base (1)..(1): GalNAc-morpholino-thymidine analog 3
  misc_feature (1)..(2): /note="phosphorothioate bond"
  modified_base (2)..(2): GalNAc-morpholino-thymidine analog 3
  misc_feature (2)..(3): /note="phosphorothioate bond"
  modified_base (3)..(3): GalNAc-morpholino-thymidine analog 3
  modified_base (4)..(4): 2'-OMe-nucleotide
  modified_base (5)..(5): 2'-OMe-nucleotide
  modified_base (6)..(6): 2'-OMe-nucleotide
  modified_base (7)..(7): 2'-OMe-nucleotide
  modified_base (8)..(8): 2'-fluoro-nucleotide
  modified_base (9)..(9): 2'-OMe-nucleotide
  modified_base (10)..(10): 2'-fluoro-nucleotide
  modified_base (11)..(11): 2'-fluoro-nucleotide
  modified_base (12)..(12): 2'-fluoro-nucleotide
  modified_base (13)..(13): 2'-OMe-nucleotide
  modified_base (14)..(14): 2'-OMe-nucleotide
  modified_base (15)..(15): 2'-OMe-nucleotide
  modified_base (16)..(16): 2'-OMe-nucleotide
  modified_base (17)..(17): 2'-OMe-nucleotide
  modified_base (18)..(18): 2'-OMe-nucleotide
  modified_base (19)..(19): 2'-OMe-nucleotide
  modified_base (20)..(20): 2'-OMe-nucleotide
  modified_base (21)..(21): 2'-OMe-nucleotide
  modified_base (22)..(22): 2'-OMe-nucleotide
  misc_feature (22)..(23): /note="phosphorothioate bond"
  modified_base (23)..(23): Locked nucleic acid (LNA) nucleotide
  misc_feature (23)..(24): /note="phosphorothioate bond"
  modified_base (24)..(24): Locked nucleic acid (LNA) nucleotide
tttggacggaguuaucgaggcatt

SEQ ID NO: 1353 - DNA, 24 bp, Artificial Sequence
  source: /note="Description of Artificial Sequence: Synthetic oligonucleotide"
  source: /note="Description of Combined DNA/RNA Molecule: Synthetic oligonucleotide"
  modified_base (1)..(1): GalNAc-morpholino-thymidine analog 3
  modified_base (2)..(2): GalNAc-morpholino-thymidine analog 3
  modified_base (3)..(3): GalNAc-morpholino-thymidine analog 3
  modified_base (4)..(4): Locked nucleic acid (LNA) nucleotide
  modified_base (5)..(5): Locked nucleic acid (LNA) nucleotide
  modified_base (6)..(6): 2'-OMe-nucleotide
  modified_base (7)..(7): 2'-OMe-nucleotide
  modified_base (8)..(8): 2'-fluoro-nucleotide
  modified_base (9)..(9): 2'-OMe-nucleotide
  modified_base (10)..(10): 2'-fluoro-nucleotide
  modified_base (11)..(11): 2'-fluoro-nucleotide
  modified_base (12)..(12): 2'-fluoro-nucleotide
  modified_base (13)..(13): 2'-OMe-nucleotide
  modified_base (14)..(14): 2'-OMe-nucleotide
  modified_base (15)..(15): 2'-OMe-nucleotide
  modified_base (16)..(16): 2'-OMe-nucleotide
  modified_base (17)..(17): 2'-OMe-nucleotide
  modified_base (18)..(18): 2'-OMe-nucleotide
  modified_base (19)..(19): 2'-OMe-nucleotide
  modified_base (20)..(20): 2'-OMe-nucleotide
  modified_base (21)..(21): 2'-OMe-nucleotide
  modified_base (22)..(22): 2'-OMe-nucleotide
  modified_base (23)..(23): Locked nucleic acid (LNA) nucleotide
  modified_base (24)..(24): Locked nucleic acid (LNA) nucleotide
tttggacggaguuaucgaggcatt

SEQ ID NO: 1354 - DNA, 24 bp, Artificial Sequence
  source: /note="Description of Artificial Sequence: Synthetic oligonucleotide"
  source: /note="Description of Combined DNA/RNA Molecule: Synthetic oligonucleotide"
  modified_base (1)..(1): GalNAc-morpholino-thymidine analog 3
  modified_base (2)..(2): GalNAc-morpholino-thymidine analog 3
  modified_base (3)..(3): GalNAc-morpholino-thymidine analog 3
  modified_base (4)..(4): Locked nucleic acid (LNA) nucleotide
  modified_base (5)..(5): Locked nucleic acid (LNA) nucleotide
  modified_base (6)..(6): 2'-OMe-nucleotide
  modified_base (7)..(7): 2'-OMe-nucleotide
  modified_base (8)..(8): 2'-fluoro-nucleotide
  modified_base (9)..(9): 2'-OMe-nucleotide
  modified_base (10)..(10): 2'-fluoro-nucleotide
  modified_base (11)..(11): 2'-fluoro-nucleotide
  modified_base (12)..(12): 2'-fluoro-nucleotide
  modified_base (13)..(13): 2'-OMe-nucleotide
  modified_base (14)..(14): 2'-OMe-nucleotide
  modified_base (15)..(15): 2'-OMe-nucleotide
  modified_base (16)..(16): 2'-OMe-nucleotide
  modified_base (17)..(17): 2'-OMe-nucleotide
  modified_base (18)..(18): 2'-OMe-nucleotide
  modified_base (19)..(19): 2'-OMe-nucleotide
  modified_base (20)..(20): 2'-OMe-nucleotide
  modified_base (21)..(21): 2'-OMe-nucleotide
  modified_base (22)..(22): 2'-OMe-nucleotide
  modified_base (23)..(23): Locked nucleic acid (LNA) nucleotide
  modified_base (24)..(24): Locked nucleic acid (LNA) nucleotide
tttggacggaguuaucgaggcatt

SEQ ID NO: 1355 - DNA, 24 bp, Artificial Sequence
  source: /note="Description of Artificial Sequence: Synthetic oligonucleotide"
  source: /note="Description of Combined DNA/RNA Molecule: Synthetic oligonucleotide"
  modified_base (1)..(1): GalNAc-morpholino-thymidine analog 3
  modified_base (2)..(2): GalNAc-morpholino-thymidine analog 3
  modified_base (3)..(3): GalNAc-morpholino-thymidine analog 3
  modified_base (4)..(4): Locked nucleic acid (LNA) nucleotide
  modified_base (5)..(5): Locked nucleic acid (LNA) nucleotide
  modified_base (6)..(6): 2'-OMe-nucleotide
  modified_base (7)..(7): 2'-OMe-nucleotide
  modified_base (8)..(8): 2'-fluoro-nucleotide
  modified_base (9)..(9): 2'-OMe-nucleotide
  modified_base (10)..(10): 2'-fluoro-nucleotide
  modified_base (11)..(11): 2'-fluoro-nucleotide
  modified_base (12)..(12): 2'-fluoro-nucleotide
  modified_base (13)..(13): 2'-OMe-nucleotide
  modified_base (14)..(14): 2'-OMe-nucleotide
  modified_base (15)..(15): 2'-OMe-nucleotide
  modified_base (16)..(16): 2'-OMe-nucleotide
  modified_base (17)..(17): 2'-OMe-nucleotide
  modified_base (18)..(18): 2'-OMe-nucleotide
  modified_base (19)..(19): 2'-OMe-nucleotide
  modified_base (20)..(20): 2'-OMe-nucleotide
  modified_base (21)..(21): 2'-OMe-nucleotide
  modified_base (22)..(22): 2'-OMe-nucleotide
  modified_base (23)..(23): Locked nucleic acid (LNA) nucleotide
  modified_base (24)..(24): Locked nucleic acid (LNA) nucleotide
tttggacggaguuaucgaggcatt

SEQ ID NO: 1356 - DNA, 24 bp, Artificial Sequence
  source: /note="Description of Artificial Sequence: Synthetic oligonucleotide"
  source: /note="Description of Combined DNA/RNA Molecule: Synthetic oligonucleotide"
  modified_base (1)..(1): GalNAc-morpholino-thymidine analog 3
  modified_base (2)..(2): GalNAc-morpholino-thymidine analog 3
  modified_base (3)..(3): GalNAc-morpholino-thymidine analog 3
  modified_base (4)..(4): Locked nucleic acid (LNA) nucleotide
  modified_base (5)..(5): Locked nucleic acid (LNA) nucleotide
  modified_base (6)..(6): 2'-OMe-nucleotide
  modified_base (7)..(7): 2'-OMe-nucleotide
  modified_base (8)..(8): 2'-fluoro-nucleotide
  modified_base (9)..(9): 2'-OMe-nucleotide
  modified_base (10)..(10): 2'-fluoro-nucleotide
  modified_base (11)..(11): 2'-fluoro-nucleotide
  modified_base (12)..(12): 2'-fluoro-nucleotide
  modified_base (13)..(13): 2'-OMe-nucleotide
  modified_base (14)..(14): 2'-OMe-nucleotide
  modified_base (15)..(15): 2'-OMe-nucleotide
  modified_base (16)..(16): 2'-OMe-nucleotide
  modified_base (17)..(17): 2'-OMe-nucleotide
  modified_base (18)..(18): 2'-OMe-nucleotide
  modified_base (19)..(19): 2'-OMe-nucleotide
  modified_base (20)..(20): 2'-OMe-nucleotide
  modified_base (21)..(21): 2'-OMe-nucleotide
  modified_base (22)..(22): 2'-OMe-nucleotide
  modified_base (23)..(23): Locked nucleic acid (LNA) nucleotide
  modified_base (24)..(24): Locked nucleic acid (LNA) nucleotide
tttggacggaguuaucgaggcatt

SEQ ID NO: 1357 - DNA, 24 bp, Artificial Sequence
  source: /note="Description of Artificial Sequence: Synthetic oligonucleotide"
  source: /note="Description of Combined DNA/RNA Molecule: Synthetic oligonucleotide"
  modified_base (1)..(1): GalNAc-morpholino-thymidine analog 3
  modified_base (2)..(2): GalNAc-morpholino-thymidine analog 3
  modified_base (3)..(3): GalNAc-morpholino-thymidine analog 3
  modified_base (4)..(4): Locked nucleic acid (LNA) nucleotide
  modified_base (5)..(5): Locked nucleic acid (LNA) nucleotide
  modified_base (6)..(6): 2'-OMe-nucleotide
  modified_base (7)..(7): 2'-OMe-nucleotide
  modified_base (8)..(8): 2'-fluoro-nucleotide
  modified_base (9)..(9): 2'-OMe-nucleotide
  modified_base (10)..(10): 2'-fluoro-nucleotide
  modified_base (11)..(11): 2'-fluoro-nucleotide
  modified_base (12)..(12): 2'-fluoro-nucleotide
  modified_base (13)..(13): 2'-OMe-nucleotide
  modified_base (14)..(14): 2'-OMe-nucleotide
  modified_base (15)..(15): 2'-OMe-nucleotide
  modified_base (16)..(16): 2'-OMe-nucleotide
  modified_base (17)..(17): 2'-OMe-nucleotide
  modified_base (18)..(18): 2'-OMe-nucleotide
  modified_base (19)..(19): 2'-OMe-nucleotide
  modified_base (20)..(20): 2'-OMe-nucleotide
  modified_base (21)..(21): 2'-OMe-nucleotide
  modified_base (22)..(22): 2'-OMe-nucleotide
  modified_base (23)..(23): Locked nucleic acid (LNA) nucleotide
  modified_base (24)..(24): Locked nucleic acid (LNA) nucleotide
tttggacggaguuaucgaggcatt

SEQ ID NO: 1358 - DNA, 24 bp, Artificial Sequence
  source: /note="Description of Artificial Sequence: Synthetic oligonucleotide"
  source: /note="Description of Combined DNA/RNA Molecule: Synthetic oligonucleotide"
  modified_base (1)..(1): GalNAc-morpholino-thymidine analog 3
  misc_feature (1)..(2): /note="phosphorothioate bond"
  modified_base (2)..(2): GalNAc-morpholino-thymidine analog 3
  misc_feature (2)..(3): /note="phosphorothioate bond"
  modified_base (3)..(3): GalNAc-morpholino-thymidine analog 3
  modified_base (4)..(4): Locked nucleic acid (LNA) nucleotide
  modified_base (5)..(5): Locked nucleic acid (LNA) nucleotide
  modified_base (6)..(6): 2'-OMe-nucleotide
  modified_base (7)..(7): 2'-OMe-nucleotide
  modified_base (8)..(8): 2'-fluoro-nucleotide
  modified_base (9)..(9): 2'-OMe-nucleotide
  modified_base (10)..(10): 2'-fluoro-nucleotide
  modified_base (11)..(11): 2'-fluoro-nucleotide
  modified_base (12)..(12): 2'-fluoro-nucleotide
  modified_base (13)..(13): 2'-OMe-nucleotide
  modified_base (14)..(14): 2'-OMe-nucleotide
  modified_base (15)..(15): 2'-OMe-nucleotide
  modified_base (16)..(16): 2'-OMe-nucleotide
  modified_base (17)..(17): 2'-OMe-nucleotide
  modified_base (18)..(18): 2'-OMe-nucleotide
  modified_base (19)..(19): 2'-OMe-nucleotide
  modified_base (20)..(20): 2'-OMe-nucleotide
  modified_base (21)..(21): 2'-OMe-nucleotide
  modified_base (22)..(22): 2'-OMe-nucleotide
  misc_feature (22)..(23): /note="phosphorothioate bond"
  modified_base (23)..(23): Locked nucleic acid (LNA) nucleotide
  misc_feature (23)..(24): /note="phosphorothioate bond"
  modified_base (24)..(24): Locked nucleic acid (LNA) nucleotide
tttggacggaguuaucgaggcatt

SEQ ID NO: 1359 - DNA, 24 bp, Artificial Sequence
  source: /note="Description of Artificial Sequence: Synthetic oligonucleotide"
  source: /note="Description of Combined DNA/RNA Molecule: Synthetic oligonucleotide"
  modified_base (1)..(1): GalNAc-morpholino-thymidine analog 3
  misc_feature (1)..(2): /note="phosphorothioate bond"
  modified_base (2)..(2): GalNAc-morpholino-thymidine analog 3
  misc_feature (2)..(3): /note="phosphorothioate bond"
  modified_base (3)..(3): GalNAc-morpholino-thymidine analog 3
  modified_base (4)..(4): Locked nucleic acid (LNA) nucleotide
  modified_base (5)..(5): Locked nucleic acid (LNA) nucleotide
  modified_base (6)..(6): 2'-OMe-nucleotide
  modified_base (7)..(7): 2'-OMe-nucleotide
  modified_base (8)..(8): 2'-fluoro-nucleotide
  modified_base (9)..(9): 2'-OMe-nucleotide
  modified_base (10)..(10): 2'-fluoro-nucleotide
  modified_base (11)..(11): 2'-fluoro-nucleotide
  modified_base (12)..(12): 2'-fluoro-nucleotide
  modified_base (13)..(13): 2'-OMe-nucleotide
  modified_base (14)..(14): 2'-OMe-nucleotide
  modified_base (15)..(15): 2'-OMe-nucleotide
  modified_base (16)..(16): 2'-OMe-nucleotide
  modified_base (17)..(17): 2'-OMe-nucleotide
  modified_base (18)..(18): 2'-OMe-nucleotide
  modified_base (19)..(19): 2'-OMe-nucleotide
  modified_base (20)..(20): 2'-OMe-nucleotide
  modified_base (21)..(21): 2'-OMe-nucleotide
  modified_base (22)..(22): 2'-OMe-nucleotide
  misc_feature (22)..(23): /note="phosphorothioate bond"
  modified_base (23)..(23): Locked nucleic acid (LNA) nucleotide
  misc_feature (23)..(24): /note="phosphorothioate bond"
  modified_base (24)..(24): Locked nucleic acid (LNA) nucleotide
tttggacggaguuaucgaggcatt

SEQ ID NO: 1360 - DNA, 24 bp, Artificial Sequence
  source: /note="Description of Artificial Sequence: Synthetic oligonucleotide"
  source: /note="Description of Combined DNA/RNA Molecule: Synthetic oligonucleotide"
  modified_base (1)..(1): GalNAc-morpholino-thymidine analog 3
  misc_feature (1)..(2): /note="phosphorothioate bond"
  modified_base (2)..(2): GalNAc-morpholino-thymidine analog 3
  misc_feature (2)..(3): /note="phosphorothioate bond"
  modified_base (3)..(3): GalNAc-morpholino-thymidine analog 3
  modified_base (4)..(4): Locked nucleic acid (LNA) nucleotide
  modified_base (5)..(5): Locked nucleic acid (LNA) nucleotide
  modified_base (6)..(6): 2'-OMe-nucleotide
  modified_base (7)..(7): 2'-OMe-nucleotide
  modified_base (8)..(8): 2'-fluoro-nucleotide
  modified_base (9)..(9): 2'-OMe-nucleotide
  modified_base (10)..(10): 2'-fluoro-nucleotide
  modified_base (11)..(11): 2'-fluoro-nucleotide
  modified_base (12)..(12): 2'-fluoro-nucleotide
  modified_base (13)..(13): 2'-OMe-nucleotide
  modified_base (14)..(14): 2'-OMe-nucleotide
  modified_base (15)..(15): 2'-OMe-nucleotide
  modified_base (16)..(16): 2'-OMe-nucleotide
  modified_base (17)..(17): 2'-OMe-nucleotide
  modified_base (18)..(18): 2'-OMe-nucleotide
  modified_base (19)..(19): 2'-OMe-nucleotide
  modified_base (20)..(20): 2'-OMe-nucleotide
  modified_base (21)..(21): 2'-OMe-nucleotide
  modified_base (22)..(22): 2'-OMe-nucleotide
  misc_feature (22)..(23): /note="phosphorothioate bond"
  modified_base (23)..(23): Locked nucleic acid (LNA) nucleotide
  misc_feature (23)..(24): /note="phosphorothioate bond"
  modified_base (24)..(24): Locked nucleic acid (LNA) nucleotide
tttggacggaguuaucgaggcatt

SEQ ID NO: 1361 - DNA, 24 bp, Artificial Sequence
  source: /note="Description of Artificial Sequence: Synthetic oligonucleotide"
  source: /note="Description of Combined DNA/RNA Molecule: Synthetic oligonucleotide"
  modified_base (1)..(1): GalNAc-morpholino-thymidine analog 3
  misc_feature (1)..(2): /note="phosphorothioate bond"
  modified_base (2)..(2): GalNAc-morpholino-thymidine analog 3
  misc_feature (2)..(3): /note="phosphorothioate bond"
  modified_base (3)..(3): GalNAc-morpholino-thymidine analog 3
  modified_base (4)..(4): Locked nucleic acid (LNA) nucleotide
  modified_base (5)..(5): Locked nucleic acid (LNA) nucleotide
  modified_base (6)..(6): 2'-OMe-nucleotide
  modified_base (7)..(7): 2'-OMe-nucleotide
  modified_base (8)..(8): 2'-fluoro-nucleotide
  modified_base (9)..(9): 2'-OMe-nucleotide
  modified_base (10)..(10): 2'-fluoro-nucleotide
  modified_base (11)..(11): 2'-fluoro-nucleotide
  modified_base (12)..(12): 2'-fluoro-nucleotide
  modified_base (13)..(13): 2'-OMe-nucleotide
  modified_base (14)..(14): 2'-OMe-nucleotide
  modified_base (15)..(15): 2'-OMe-nucleotide
  modified_base (16)..(16): 2'-OMe-nucleotide
  modified_base (17)..(17): 2'-OMe-nucleotide
  modified_base (18)..(18): 2'-OMe-nucleotide
  modified_base (19)..(19): 2'-OMe-nucleotide
  modified_base (20)..(20): 2'-OMe-nucleotide
  modified_base (21)..(21): 2'-OMe-nucleotide
  modified_base (22)..(22): 2'-OMe-nucleotide
  misc_feature (22)..(23): /note="phosphorothioate bond"
  modified_base (23)..(23): Locked nucleic acid (LNA) nucleotide
  misc_feature (23)..(24): /note="phosphorothioate bond"
  modified_base (24)..(24): Locked nucleic acid (LNA) nucleotide
tttggacggaguuaucgaggcatt

SEQ ID NO: 1362 - DNA, 24 bp, Artificial Sequence
  source: /note="Description of Artificial Sequence: Synthetic oligonucleotide"
  source: /note="Description of Combined DNA/RNA Molecule: Synthetic oligonucleotide"
  modified_base (1)..(1): GalNAc-morpholino-thymidine analog 3
  misc_feature (1)..(2): /note="phosphorothioate bond"
  modified_base (2)..(2): GalNAc-morpholino-thymidine analog 3
  misc_feature (2)..(3): /note="phosphorothioate bond"
  modified_base (3)..(3): GalNAc-morpholino-thymidine analog 3
  modified_base (4)..(4): Locked nucleic acid (LNA) nucleotide
  modified_base (5)..(5): Locked nucleic acid (LNA) nucleotide
  modified_base (6)..(6): 2'-OMe-nucleotide
  modified_base (7)..(7): 2'-OMe-nucleotide
  modified_base (8)..(8): 2'-fluoro-nucleotide
  modified_base (9)..(9): 2'-OMe-nucleotide
  modified_base (10)..(10): 2'-fluoro-nucleotide
  modified_base (11)..(11): 2'-fluoro-nucleotide
  modified_base (12)..(12): 2'-fluoro-nucleotide
  modified_base (13)..(13): 2'-OMe-nucleotide
  modified_base (14)..(14): 2'-OMe-nucleotide
  modified_base (15)..(15): 2'-OMe-nucleotide
  modified_base (16)..(16): 2'-OMe-nucleotide
  modified_base (17)..(17): 2'-OMe-nucleotide
  modified_base (18)..(18): 2'-OMe-nucleotide
  modified_base (19)..(19): 2'-OMe-nucleotide
  modified_base (20)..(20): 2'-OMe-nucleotide
  modified_base (21)..(21): 2'-OMe-nucleotide
  modified_base (22)..(22): 2'-OMe-nucleotide
  misc_feature (22)..(23): /note="phosphorothioate bond"
  modified_base (23)..(23): Locked nucleic acid (LNA) nucleotide
  misc_feature (23)..(24): /note="phosphorothioate bond"
  modified_base (24)..(24): Locked nucleic acid (LNA) nucleotide
tttggacggaguuaucgaggcatt

SEQ ID NO: 1363 - DNA, 22 bp, Artificial Sequence
  source: /note="Description of Artificial Sequence: Synthetic oligonucleotide"
  source: /note="Description of Combined DNA/RNA Molecule: Synthetic oligonucleotide"
  modified_base (1)..(1): GalNAc-morpholino-thymidine analog 3
  modified_base (2)..(2): GalNAc-morpholino-thymidine analog 3
  modified_base (3)..(3): GalNAc-morpholino-thymidine analog 3
  modified_base (4)..(4): 2'-OMe-nucleotide
  modified_base (5)..(5): 2'-OMe-nucleotide
  modified_base (6)..(6): 2'-OMe-nucleotide
  modified_base (7)..(7): 2'-OMe-nucleotide
  modified_base (8)..(8): 2'-fluoro-nucleotide
  modified_base (9)..(9): 2'-OMe-nucleotide
  modified_base (10)..(10): 2'-fluoro-nucleotide
  modified_base (11)..(11): 2'-fluoro-nucleotide
  modified_base (12)..(12): 2'-fluoro-nucleotide
  modified_base (13)..(13): 2'-OMe-nucleotide
  modified_base (14)..(14): 2'-OMe-nucleotide
  modified_base (15)..(15): 2'-OMe-nucleotide
  modified_base (16)..(16): 2'-OMe-nucleotide
  modified_base (17)..(17): 2'-OMe-nucleotide
  modified_base (18)..(18): 2'-OMe-nucleotide
  modified_base (19)..(19): 2'-OMe-nucleotide
  modified_base (20)..(20): 2'-OMe-nucleotide
  misc_feature (20)..(21): /note="phosphorothioate bond"
  modified_base (21)..(21): 2'-OMe-nucleotide
  misc_feature (21)..(22): /note="phosphorothioate bond"
  modified_base (22)..(22): 2'-OMe-nucleotide
tttgccagaguuaucgaggcac

SEQ ID NO: 1364 - DNA, 22 bp, Artificial Sequence
  source: /note="Description of Artificial Sequence: Synthetic oligonucleotide"
  source: /note="Description of Combined DNA/RNA Molecule: Synthetic oligonucleotide"
  modified_base (1)..(1): GalNAc-morpholino-thymidine analog 3
  modified_base (2)..(2): GalNAc-morpholino-thymidine analog 3
  modified_base (3)..(3): GalNAc-morpholino-thymidine analog 3
  modified_base (4)..(4): 2'-OMe-nucleotide
  modified_base (5)..(5): 2'-OMe-nucleotide
  modified_base (6)..(6): 2'-OMe-nucleotide
  modified_base (7)..(7): 2'-OMe-nucleotide
  modified_base (8)..(8): 2'-fluoro-nucleotide
  modified_base (9)..(9): 2'-OMe-nucleotide
  modified_base (10)..(10): 2'-fluoro-nucleotide
  modified_base (11)..(11): 2'-fluoro-nucleotide
  modified_base (12)..(12): 2'-fluoro-nucleotide
  modified_base (13)..(13): 2'-OMe-nucleotide
  modified_base (14)..(14): 2'-OMe-nucleotide
  modified_base (15)..(15): 2'-OMe-nucleotide
  modified_base (16)..(16): 2'-OMe-nucleotide
  modified_base (17)..(17): 2'-OMe-nucleotide
  modified_base (18)..(18): 2'-OMe-nucleotide
  modified_base (19)..(19): 2'-OMe-nucleotide
  modified_base (20)..(20): 2'-OMe-nucleotide
  misc_feature (20)..(21): /note="phosphorothioate bond"
  modified_base (21)..(21): 2'-OMe-nucleotide
  misc_feature (21)..(22): /note="phosphorothioate bond"
  modified_base (22)..(22): 2'-OMe-nucleotide
tttgccagaguuaucgaggcac

SEQ ID NO: 1365 - DNA, 22 bp, Artificial Sequence
  source: /note="Description of Artificial Sequence: Synthetic oligonucleotide"
  source: /note="Description of Combined DNA/RNA Molecule: Synthetic oligonucleotide"
  modified_base (1)..(1): GalNAc-morpholino-thymidine analog 3
  modified_base (2)..(2): GalNAc-morpholino-thymidine analog 3
  modified_base (3)..(3): GalNAc-morpholino-thymidine analog 3
  modified_base (4)..(4): 2'-OMe-nucleotide
  modified_base (5)..(5): 2'-OMe-nucleotide
  modified_base (6)..(6): 2'-OMe-nucleotide
  modified_base (7)..(7): 2'-OMe-nucleotide
  modified_base (8)..(8): 2'-fluoro-nucleotide
  modified_base (9)..(9): 2'-OMe-nucleotide
  modified_base (10)..(10): 2'-fluoro-nucleotide
  modified_base (11)..(11): 2'-fluoro-nucleotide
  modified_base (12)..(12): 2'-fluoro-nucleotide
  modified_base (13)..(13): 2'-OMe-nucleotide
  modified_base (14)..(14): 2'-OMe-nucleotide
  modified_base (15)..(15): 2'-OMe-nucleotide
  modified_base (16)..(16): 2'-OMe-nucleotide
  modified_base (17)..(17): 2'-OMe-nucleotide
  modified_base (18)..(18): 2'-OMe-nucleotide
  modified_base (19)..(19): 2'-OMe-nucleotide
  modified_base (20)..(20): 2'-OMe-nucleotide
  misc_feature (20)..(21): /note="phosphorothioate bond"
  modified_base (21)..(21): 2'-OMe-nucleotide
  misc_feature (21)..(22): /note="phosphorothioate bond"
  modified_base (22)..(22): 2'-OMe-nucleotide
tttgccagaguuaucgaggcac

SEQ ID NO: 1366 - DNA, 22 bp, Artificial Sequence
  source: /note="Description of Artificial Sequence: Synthetic oligonucleotide"
  source: /note="Description of Combined DNA/RNA Molecule: Synthetic oligonucleotide"
  modified_base (1)..(1): GalNAc-morpholino-thymidine analog 3
  modified_base (2)..(2): GalNAc-morpholino-thymidine analog 3
  modified_base (3)..(3): GalNAc-morpholino-thymidine analog 3
  modified_base (4)..(4): 2'-OMe-nucleotide
  modified_base (5)..(5): 2'-OMe-nucleotide
  modified_base (6)..(6): 2'-OMe-nucleotide
  modified_base (7)..(7): 2'-OMe-nucleotide
  modified_base (8)..(8): 2'-fluoro-nucleotide
  modified_base (9)..(9): 2'-OMe-nucleotide
  modified_base (10)..(10): 2'-fluoro-nucleotide
  modified_base (11)..(11): 2'-fluoro-nucleotide
  modified_base (12)..(12): 2'-fluoro-nucleotide
  modified_base (13)..(13): 2'-OMe-nucleotide
  modified_base (14)..(14): 2'-OMe-nucleotide
  modified_base (15)..(15): 2'-OMe-nucleotide
  modified_base (16)..(16): 2'-OMe-nucleotide
  modified_base (17)..(17): 2'-OMe-nucleotide
  modified_base (18)..(18): 2'-OMe-nucleotide
  modified_base (19)..(19): 2'-OMe-nucleotide
  modified_base (20)..(20): 2'-OMe-nucleotide
  misc_feature (20)..(21): /note="phosphorothioate bond"
  modified_base (21)..(21): 2'-OMe-nucleotide
  misc_feature (21)..(22): /note="phosphorothioate bond"
  modified_base (22)..(22): 2'-OMe-nucleotide
tttgccagaguuaucgaggcac

SEQ ID NO: 1367 - DNA, 22 bp, Artificial Sequence
  source: /note="Description of Artificial Sequence: Synthetic oligonucleotide"
  source: /note="Description of Combined DNA/RNA Molecule: Synthetic oligonucleotide"
  modified_base (1)..(1): GalNAc-morpholino-thymidine analog 3
  modified_base (2)..(2): GalNAc-morpholino-thymidine analog 3
  modified_base (3)..(3): GalNAc-morpholino-thymidine analog 3
  modified_base (4)..(4): 2'-OMe-nucleotide
  modified_base (5)..(5): 2'-OMe-nucleotide
  modified_base (6)..(6): 2'-OMe-nucleotide
  modified_base (7)..(7): 2'-OMe-nucleotide
  modified_base (8)..(8): 2'-fluoro-nucleotide
  modified_base (9)..(9): 2'-OMe-nucleotide
  modified_base (10)..(10): 2'-fluoro-nucleotide
  modified_base (11)..(11): 2'-fluoro-nucleotide
  modified_base (12)..(12): 2'-fluoro-nucleotide
  modified_base (13)..(13): 2'-OMe-nucleotide
  modified_base (14)..(14): 2'-OMe-nucleotide
  modified_base (15)..(15): 2'-OMe-nucleotide
  modified_base (16)..(16): 2'-OMe-nucleotide
  modified_base (17)..(17): 2'-OMe-nucleotide
  modified_base (18)..(18): 2'-OMe-nucleotide
  modified_base (19)..(19): 2'-OMe-nucleotide
  modified_base (20)..(20): 2'-OMe-nucleotide
  misc_feature (20)..(21): /note="phosphorothioate bond"
  modified_base (21)..(21): 2'-OMe-nucleotide
  misc_feature (21)..(22): /note="phosphorothioate bond"
  modified_base (22)..(22): 2'-OMe-nucleotide
tttgccagaguuaucgaggcac

SEQ ID NO: 1368 - DNA, 22 bp, Artificial Sequence
  source: /note="Description of Artificial Sequence: Synthetic oligonucleotide"
  source: /note="Description of Combined DNA/RNA Molecule: Synthetic oligonucleotide"
  modified_base (1)..(1): GalNAc-morpholino-thymidine analog 3
  modified_base (2)..(2): GalNAc-morpholino-thymidine analog 3
  modified_base (3)..(3): GalNAc-morpholino-thymidine analog 3
  modified_base (4)..(4): Locked nucleic acid (LNA) nucleotide
  modified_base (5)..(5): Locked nucleic acid (LNA) nucleotide
  modified_base (6)..(6): 2'-OMe-nucleotide
  modified_base (7)..(7): 2'-OMe-nucleotide
  modified_base (8)..(8): 2'-fluoro-nucleotide
  modified_base (9)..(9): 2'-OMe-nucleotide
  modified_base (10)..(10): 2'-fluoro-nucleotide
  modified_base (11)..(11): 2'-fluoro-nucleotide
  modified_base (12)..(12): 2'-fluoro-nucleotide
  modified_base (13)..(13): 2'-OMe-nucleotide
  modified_base (14)..(14): 2'-OMe-nucleotide
  modified_base (15)..(15): 2'-OMe-nucleotide
  modified_base (16)..(16): 2'-OMe-nucleotide
  modified_base (17)..(17): 2'-OMe-nucleotide
  modified_base (18)..(18): 2'-OMe-nucleotide
  modified_base (19)..(19): 2'-OMe-nucleotide
  modified_base (20)..(20): 2'-OMe-nucleotide
  misc_feature (20)..(21): /note="phosphorothioate bond"
  modified_base (21)..(21): 2'-OMe-nucleotide
  misc_feature (21)..(22): /note="phosphorothioate bond"
  modified_base (22)..(22): 2'-OMe-nucleotide
tttgccagaguuaucgaggcac

SEQ ID NO: 1369 - DNA, 22 bp, Artificial Sequence
  source: /note="Description of Artificial Sequence: Synthetic oligonucleotide"
  source: /note="Description of Combined DNA/RNA Molecule: Synthetic oligonucleotide"
  modified_base (1)..(1): GalNAc-morpholino-thymidine analog 3
  modified_base (2)..(2): GalNAc-morpholino-thymidine analog 3
  modified_base (3)..(3): GalNAc-morpholino-thymidine analog 3
  modified_base (4)..(4): Locked nucleic acid (LNA) nucleotide
  modified_base (5)..(5): Locked nucleic acid (LNA) nucleotide
  modified_base (6)..(6): 2'-OMe-nucleotide
  modified_base (7)..(7): 2'-OMe-nucleotide
  modified_base (8)..(8): 2'-fluoro-nucleotide
  modified_base (9)..(9): 2'-OMe-nucleotide
  modified_base (10)..(10): 2'-fluoro-nucleotide
  modified_base (11)..(11): 2'-fluoro-nucleotide
  modified_base (12)..(12): 2'-fluoro-nucleotide
  modified_base (13)..(13): 2'-OMe-nucleotide
  modified_base (14)..(14): 2'-OMe-nucleotide
  modified_base (15)..(15): 2'-OMe-nucleotide
  modified_base (16)..(16): 2'-OMe-nucleotide
  modified_base (17)..(17): 2'-OMe-nucleotide
  modified_base (18)..(18): 2'-OMe-nucleotide
  modified_base (19)..(19): 2'-OMe-nucleotide
  modified_base (20)..(20): 2'-OMe-nucleotide
  misc_feature (20)..(21): /note="phosphorothioate bond"
  modified_base (21)..(21): 2'-OMe-nucleotide
  misc_feature (21)..(22): /note="phosphorothioate bond"
  modified_base (22)..(22): 2'-OMe-nucleotide
tttgccagaguuaucgaggcac

SEQ ID NO: 1370 - DNA, 22 bp, Artificial Sequence
  source: /note="Description of Artificial Sequence: Synthetic oligonucleotide"
  source: /note="Description of Combined DNA/RNA Molecule: Synthetic oligonucleotide"
  modified_base (1)..(1): GalNAc-morpholino-thymidine analog 3
  modified_base (2)..(2): GalNAc-morpholino-thymidine analog 3
  modified_base (3)..(3): GalNAc-morpholino-thymidine analog 3
  modified_base (4)..(4): Locked nucleic acid (LNA) nucleotide
  modified_base (5)..(5): Locked nucleic acid (LNA) nucleotide
  modified_base (6)..(6): 2'-OMe-nucleotide
  modified_base (7)..(7): 2'-OMe-nucleotide
  modified_base (8)..(8): 2'-fluoro-nucleotide
  modified_base (9)..(9): 2'-OMe-nucleotide
  modified_base (10)..(10): 2'-fluoro-nucleotide
  modified_base (11)..(11): 2'-fluoro-nucleotide
  modified_base (12)..(12): 2'-fluoro-nucleotide
  modified_base (13)..(13): 2'-OMe-nucleotide
  modified_base (14)..(14): 2'-OMe-nucleotide
  modified_base (15)..(15): 2'-OMe-nucleotide
  modified_base (16)..(16): 2'-OMe-nucleotide
  modified_base (17)..(17): 2'-OMe-nucleotide
  modified_base (18)..(18): 2'-OMe-nucleotide
  modified_base (19)..(19): 2'-OMe-nucleotide
  modified_base (20)..(20): 2'-OMe-nucleotide
  misc_feature (20)..(21): /note="phosphorothioate bond"
  modified_base (21)..(21): 2'-OMe-nucleotide
  misc_feature (21)..(22): /note="phosphorothioate bond"
  modified_base (22)..(22): 2'-OMe-nucleotide
tttgccagaguuaucgaggcac

SEQ ID NO: 1371 - DNA, 22 bp, Artificial Sequence
  source: /note="Description of Artificial Sequence: Synthetic oligonucleotide"
  source: /note="Description of Combined DNA/RNA Molecule: Synthetic oligonucleotide"
  modified_base (1)..(1): GalNAc-morpholino-thymidine analog 3
  modified_base (2)..(2): GalNAc-morpholino-thymidine analog 3
  modified_base (3)..(3): GalNAc-morpholino-thymidine analog 3
  modified_base (4)..(4): Locked nucleic acid (LNA) nucleotide
  modified_base (5)..(5): Locked nucleic acid (LNA) nucleotide
  modified_base (6)..(6): 2'-OMe-nucleotide
  modified_base (7)..(7): 2'-OMe-nucleotide
  modified_base (8)..(8): 2'-fluoro-nucleotide
  modified_base (9)..(9): 2'-OMe-nucleotide
  modified_base (10)..(10): 2'-fluoro-nucleotide
  modified_base (11)..(11): 2'-fluoro-nucleotide
  modified_base (12)..(12): 2'-fluoro-nucleotide
  modified_base (13)..(13): 2'-OMe-nucleotide
  modified_base (14)..(14): 2'-OMe-nucleotide
  modified_base (15)..(15): 2'-OMe-nucleotide
  modified_base (16)..(16): 2'-OMe-nucleotide
  modified_base (17)..(17): 2'-OMe-nucleotide
  modified_base (18)..(18): 2'-OMe-nucleotide
  modified_base (19)..(19): 2'-OMe-nucleotide
  modified_base (20)..(20): 2'-OMe-nucleotide
  misc_feature (20)..(21): /note="phosphorothioate bond"
  modified_base (21)..(21): 2'-OMe-nucleotide
  misc_feature (21)..(22): /note="phosphorothioate bond"
  modified_base (22)..(22): 2'-OMe-nucleotide
tttgccagaguuaucgaggcac

SEQ ID NO: 1372 - DNA, 22 bp, Artificial Sequence
  source: /note="Description of Artificial Sequence: Synthetic oligonucleotide"
  source: /note="Description of Combined DNA/RNA Molecule: Synthetic oligonucleotide"
  modified_base (1)..(1): GalNAc-morpholino-thymidine analog 3
  modified_base (2)..(2): GalNAc-morpholino-thymidine analog 3
  modified_base (3)..(3): GalNAc-morpholino-thymidine analog 3
  modified_base (4)..(4): Locked nucleic acid (LNA) nucleotide
  modified_base (5)..(5): Locked nucleic acid (LNA) nucleotide
  modified_base (6)..(6): 2'-OMe-nucleotide
  modified_base (7)..(7): 2'-OMe-nucleotide
  modified_base (8)..(8): 2'-fluoro-nucleotide
  modified_base (9)..(9): 2'-OMe-nucleotide
  modified_base (10)..(10): 2'-fluoro-nucleotide
  modified_base (11)..(11): 2'-fluoro-nucleotide
  modified_base (12)..(12): 2'-fluoro-nucleotide
  modified_base (13)..(13): 2'-OMe-nucleotide
  modified_base (14)..(14): 2'-OMe-nucleotide
  modified_base (15)..(15): 2'-OMe-nucleotide
  modified_base (16)..(16): 2'-OMe-nucleotide
  modified_base (17)..(17): 2'-OMe-nucleotide
  modified_base (18)..(18): 2'-OMe-nucleotide
  modified_base (19)..(19): 2'-OMe-nucleotide
  modified_base (20)..(20): 2'-OMe-nucleotide
  misc_feature (20)..(21): /note="phosphorothioate bond"
  modified_base (21)..(21): 2'-OMe-nucleotide
  misc_feature (21)..(22): /note="phosphorothioate bond"
  modified_base (22)..(22): 2'-OMe-nucleotide
tttgccagaguuaucgaggcac

SEQ ID NO: 1373 - DNA, 22 bp, Artificial Sequence
  source: /note="Description of Artificial Sequence: Synthetic oligonucleotide"
  source: /note="Description of Combined DNA/RNA Molecule: Synthetic oligonucleotide"
  modified_base (1)..(1): GalNAc-morpholino-thymidine analog 3
  modified_base (2)..(2): GalNAc-morpholino-thymidine analog 3
  modified_base (3)..(3): GalNAc-morpholino-thymidine analog 3
  modified_base (4)..(4): 2'-OMe-nucleotide
  modified_base (5)..(5): 2'-OMe-nucleotide
  modified_base (6)..(6): 2'-OMe-nucleotide
  modified_base (7)..(7): 2'-OMe-nucleotide
  modified_base (8)..(8): 2'-fluoro-nucleotide
  modified_base (9)..(9): 2'-OMe-nucleotide
  modified_base (10)..(10): 2'-fluoro-nucleotide
  modified_base (11)..(11): 2'-fluoro-nucleotide
  modified_base (12)..(12): 2'-fluoro-nucleotide
  modified_base (13)..(13): 2'-OMe-nucleotide
  modified_base (14)..(14): 2'-OMe-nucleotide
  modified_base (15)..(15): 2'-OMe-nucleotide
  modified_base (16)..(16): 2'-OMe-nucleotide
  modified_base (17)..(17): 2'-OMe-nucleotide
  modified_base (18)..(18): 2'-OMe-nucleotide
  modified_base (19)..(19): 2'-OMe-nucleotide
  modified_base (20)..(20): 2'-OMe-nucleotide
  modified_base (21)..(21): Locked nucleic acid (LNA) nucleotide
  modified_base (22)..(22): Locked nucleic acid (LNA) nucleotide
tttgccagaguuaucgaggctt

SEQ ID NO: 1374 - DNA, 22 bp, Artificial Sequence
  source: /note="Description of Artificial Sequence: Synthetic oligonucleotide"
  source: /note="Description of Combined DNA/RNA Molecule: Synthetic oligonucleotide"
  modified_base (1)..(1): GalNAc-morpholino-thymidine analog 3
  modified_base (2)..(2): GalNAc-morpholino-thymidine analog 3
  modified_base (3)..(3): GalNAc-morpholino-thymidine analog 3
  modified_base (4)..(4): 2'-OMe-nucleotide
  modified_base (5)..(5): 2'-OMe-nucleotide
  modified_base (6)..(6): 2'-OMe-nucleotide
  modified_base (7)..(7): 2'-OMe-nucleotide
  modified_base (8)..(8): 2'-fluoro-nucleotide
  modified_base (9)..(9): 2'-OMe-nucleotide
  modified_base (10)..(10): 2'-fluoro-nucleotide
  modified_base (11)..(11): 2'-fluoro-nucleotide
  modified_base (12)..(12): 2'-fluoro-nucleotide
  modified_base (13)..(13): 2'-OMe-nucleotide
  modified_base (14)..(14): 2'-OMe-nucleotide
  modified_base (15)..(15): 2'-OMe-nucleotide
  modified_base (16)..(16): 2'-OMe-nucleotide
  modified_base (17)..(17): 2'-OMe-nucleotide
  modified_base (18)..(18): 2'-OMe-nucleotide
  modified_base (19)..(19): 2'-OMe-nucleotide
  modified_base (20)..(20): 2'-OMe-nucleotide
  modified_base (21)..(21): Locked nucleic acid (LNA) nucleotide
  modified_base (22)..(22): Locked nucleic acid (LNA) nucleotide
tttgccagaguuaucgaggctt

SEQ ID NO: 1375 - DNA, 22 bp, Artificial Sequence
  source: /note="Description of Artificial Sequence: Synthetic oligonucleotide"
  source: /note="Description of Combined DNA/RNA Molecule: Synthetic oligonucleotide"
  modified_base (1)..(1): GalNAc-morpholino-thymidine analog 3
  modified_base (2)..(2): GalNAc-morpholino-thymidine analog 3
  modified_base (3)..(3): GalNAc-morpholino-thymidine analog 3
  modified_base (4)..(4): 2'-OMe-nucleotide
  modified_base (5)..(5): 2'-OMe-nucleotide
  modified_base (6)..(6): 2'-OMe-nucleotide
  modified_base (7)..(7): 2'-OMe-nucleotide
  modified_base (8)..(8): 2'-fluoro-nucleotide
  modified_base (9)..(9): 2'-OMe-nucleotide
  modified_base (10)..(10): 2'-fluoro-nucleotide
  modified_base (11)..(11): 2'-fluoro-nucleotide
  modified_base (12)..(12): 2'-fluoro-nucleotide
  modified_base (13)..(13): 2'-OMe-nucleotide
  modified_base (14)..(14): 2'-OMe-nucleotide
  modified_base (15)..(15): 2'-OMe-nucleotide
  modified_base (16)..(16): 2'-OMe-nucleotide
  modified_base (17)..(17): 2'-OMe-nucleotide
  modified_base (18)..(18): 2'-OMe-nucleotide
  modified_base (19)..(19): 2'-OMe-nucleotide
  modified_base (20)..(20): 2'-OMe-nucleotide
  modified_base (21)..(21): Locked nucleic acid (LNA) nucleotide
  modified_base (22)..(22): Locked nucleic acid (LNA) nucleotide
tttgccagaguuaucgaggctt

SEQ ID NO: 1376 - DNA, 22 bp, Artificial Sequence
  source: /note="Description of Artificial Sequence: Synthetic oligonucleotide"
  source: /note="Description of Combined DNA/RNA Molecule: Synthetic oligonucleotide"
  modified_base (1)..(1): GalNAc-morpholino-thymidine analog 3
  modified_base (2)..(2): GalNAc-morpholino-thymidine analog 3
  modified_base (3)..(3): GalNAc-morpholino-thymidine analog 3
  modified_base (4)..(4): 2'-OMe-nucleotide
  modified_base (5)..(5): 2'-OMe-nucleotide
  modified_base (6)..(6): 2'-OMe-nucleotide
  modified_base (7)..(7): 2'-OMe-nucleotide
  modified_base (8)..(8): 2'-fluoro-nucleotide
  modified_base (9)..(9): 2'-OMe-nucleotide
  modified_base (10)..(10): 2'-fluoro-nucleotide
  modified_base (11)..(11): 2'-fluoro-nucleotide
  modified_base (12)..(12): 2'-fluoro-nucleotide
  modified_base (13)..(13): 2'-OMe-nucleotide
  modified_base (14)..(14): 2'-OMe-nucleotide
  modified_base (15)..(15): 2'-OMe-nucleotide
  modified_base (16)..(16): 2'-OMe-nucleotide
  modified_base (17)..(17): 2'-OMe-nucleotide
  modified_base (18)..(18): 2'-OMe-nucleotide
  modified_base (19)..(19): 2'-OMe-nucleotide
  modified_base (20)..(20): 2'-OMe-nucleotide
  modified_base (21)..(21): Locked nucleic acid (LNA) nucleotide
  modified_base (22)..(22): Locked nucleic acid (LNA) nucleotide
tttgccagaguuaucgaggctt

SEQ ID NO: 1377 - DNA, 22 bp, Artificial Sequence
  source: /note="Description of Artificial Sequence: Synthetic oligonucleotide"
  source: /note="Description of Combined DNA/RNA Molecule: Synthetic oligonucleotide"
  modified_base (1)..(1): GalNAc-morpholino-thymidine analog 3
  modified_base (2)..(2): GalNAc-morpholino-thymidine analog 3
  modified_base (3)..(3): GalNAc-morpholino-thymidine analog 3
  modified_base (4)..(4): 2'-OMe-nucleotide
  modified_base (5)..(5): 2'-OMe-nucleotide
  modified_base (6)..(6): 2'-OMe-nucleotide
  modified_base (7)..(7): 2'-OMe-nucleotide
  modified_base (8)..(8): 2'-fluoro-nucleotide
  modified_base (9)..(9): 2'-OMe-nucleotide
  modified_base (10)..(10): 2'-fluoro-nucleotide
  modified_base (11)..(11): 2'-fluoro-nucleotide
  modified_base (12)..(12): 2'-fluoro-nucleotide
  modified_base (13)..(13): 2'-OMe-nucleotide
  modified_base (14)..(14): 2'-OMe-nucleotide
  modified_base (15)..(15): 2'-OMe-nucleotide
  modified_base (16)..(16): 2'-OMe-nucleotide
  modified_base (17)..(17): 2'-OMe-nucleotide
  modified_base (18)..(18): 2'-OMe-nucleotide
  modified_base (19)..(19): 2'-OMe-nucleotide
  modified_base (20)..(20): 2'-OMe-nucleotide
  modified_base (21)..(21): Locked nucleic acid (LNA) nucleotide
  modified_base (22)..(22): Locked nucleic acid (LNA) nucleotide
tttgccagaguuaucgaggctt

SEQ ID NO: 1378 - DNA, 22 bp, Artificial Sequence
  source: /note="Description of Artificial Sequence: Synthetic oligonucleotide"
  source: /note="Description of Combined DNA/RNA Molecule: Synthetic oligonucleotide"
  modified_base (1)..(1): GalNAc-morpholino-thymidine analog 3
  modified_base (2)..(2): GalNAc-morpholino-thymidine analog 3
  modified_base (3)..(3): GalNAc-morpholino-thymidine analog 3
  modified_base (4)..(4): 2'-OMe-nucleotide
  modified_base (5)..(5): 2'-OMe-nucleotide
  modified_base (6)..(6): 2'-OMe-nucleotide
  modified_base (7)..(7): 2'-OMe-nucleotide
  modified_base (8)..(8): 2'-fluoro-nucleotide
  modified_base (9)..(9): 2'-OMe-nucleotide
  modified_base (10)..(10): 2'-fluoro-nucleotide
  modified_base (11)..(11): 2'-fluoro-nucleotide
  modified_base (12)..(12): 2'-fluoro-nucleotide
  modified_base (13)..(13): 2'-OMe-nucleotide
  modified_base (14)..(14): 2'-OMe-nucleotide
  modified_base (15)..(15): 2'-OMe-nucleotide
  modified_base (16)..(16): 2'-OMe-nucleotide
  modified_base (17)..(17): 2'-OMe-nucleotide
  modified_base (18)..(18): 2'-OMe-nucleotide
  modified_base (19)..(19): 2'-OMe-nucleotide
  modified_base (20)..(20): 2'-OMe-nucleotide
  modified_base (21)..(21): Locked nucleic acid (LNA) nucleotide
  modified_base (22)..(22): Locked nucleic acid (LNA) nucleotide
tttgccagaguuaucgaggctt

SEQ ID NO: 1379 - DNA, 22 bp, Artificial Sequence
  source: /note="Description of Artificial Sequence: Synthetic oligonucleotide"
  source: /note="Description of Combined DNA/RNA Molecule: Synthetic oligonucleotide"
  modified_base (1)..(1): GalNAc-morpholino-thymidine analog 3
  modified_base (2)..(2): GalNAc-morpholino-thymidine analog 3
  modified_base (3)..(3): GalNAc-morpholino-thymidine analog 3
  modified_base (4)..(4): 2'-OMe-nucleotide
  modified_base (5)..(5): 2'-OMe-nucleotide
  modified_base (6)..(6): 2'-OMe-nucleotide
  modified_base (7)..(7): 2'-OMe-nucleotide
  modified_base (8)..(8): 2'-fluoro-nucleotide
  modified_base (9)..(9): 2'-OMe-nucleotide
  modified_base (10)..(10): 2'-fluoro-nucleotide
  modified_base (11)..(11): 2'-fluoro-nucleotide
  modified_base (12)..(12): 2'-fluoro-nucleotide
  modified_base (13)..(13): 2'-OMe-nucleotide
  modified_base (14)..(14): 2'-OMe-nucleotide
  modified_base (15)..(15): 2'-OMe-nucleotide
  modified_base (16)..(16): 2'-OMe-nucleotide
  modified_base (17)..(17): 2'-OMe-nucleotide
  modified_base (18)..(18): 2'-OMe-nucleotide
  modified_base (19)..(19): 2'-OMe-nucleotide
  modified_base (20)..(20): 2'-OMe-nucleotide
  modified_base (21)..(21): Locked nucleic acid (LNA) nucleotide
  modified_base (22)..(22): Locked nucleic acid (LNA) nucleotide
tttgccagaguuaucgaggctt

SEQ ID NO: 1380 - DNA, 22 bp, Artificial Sequence
  source: /note="Description of Artificial Sequence: Synthetic oligonucleotide"
  source: /note="Description of Combined DNA/RNA Molecule: Synthetic oligonucleotide"
  modified_base (1)..(1): GalNAc-morpholino-thymidine analog 3
  modified_base (2)..(2): GalNAc-morpholino-thymidine analog 3
  modified_base (3)..(3): GalNAc-morpholino-thymidine analog 3
  modified_base (4)..(4): 2'-OMe-nucleotide
  modified_base (5)..(5): 2'-OMe-nucleotide
  modified_base (6)..(6): 2'-OMe-nucleotide
  modified_base (7)..(7): 2'-OMe-nucleotide
  modified_base (8)..(8): 2'-fluoro-nucleotide
  modified_base (9)..(9): 2'-OMe-nucleotide
  modified_base (10)..(10): 2'-fluoro-nucleotide
  modified_base (11)..(11): 2'-fluoro-nucleotide
  modified_base (12)..(12): 2'-fluoro-nucleotide
  modified_base (13)..(13): 2'-OMe-nucleotide
  modified_base (14)..(14): 2'-OMe-nucleotide
  modified_base (15)..(15): 2'-OMe-nucleotide
  modified_base (16)..(16): 2'-OMe-nucleotide
  modified_base (17)..(17): 2'-OMe-nucleotide
  modified_base (18)..(18): 2'-OMe-nucleotide
  modified_base (19)..(19): 2'-OMe-nucleotide
  modified_base (20)..(20): 2'-OMe-nucleotide
  modified_base (21)..(21): Locked nucleic acid (LNA) nucleotide
  modified_base (22)..(22): Locked nucleic acid (LNA) nucleotide
tttgccagaguuaucgaggctt

SEQ ID NO: 1381 - DNA, 22 bp, Artificial Sequence
  source: /note="Description of Artificial Sequence: Synthetic oligonucleotide"
  source: /note="Description of Combined DNA/RNA Molecule: Synthetic oligonucleotide"
  modified_base (1)..(1): GalNAc-morpholino-thymidine analog 3
  modified_base (2)..(2): GalNAc-morpholino-thymidine analog 3
  modified_base (3)..(3): GalNAc-morpholino-thymidine analog 3
  modified_base (4)..(4): 2'-OMe-nucleotide
  modified_base (5)..(5): 2'-OMe-nucleotide
  modified_base (6)..(6): 2'-OMe-nucleotide
  modified_base (7)..(7): 2'-OMe-nucleotide
  modified_base (8)..(8): 2'-fluoro-nucleotide
  modified_base (9)..(9): 2'-OMe-nucleotide
  modified_base (10)..(10): 2'-fluoro-nucleotide
  modified_base (11)..(11): 2'-fluoro-nucleotide
  modified_base (12)..(12): 2'-fluoro-nucleotide
  modified_base (13)..(13): 2'-OMe-nucleotide
  modified_base (14)..(14): 2'-OMe-nucleotide
  modified_base (15)..(15): 2'-OMe-nucleotide
  modified_base (16)..(16): 2'-OMe-nucleotide
  modified_base (17)..(17): 2'-OMe-nucleotide
  modified_base (18)..(18): 2'-OMe-nucleotide
  modified_base (19)..(19): 2'-OMe-nucleotide
  modified_base (20)..(20): 2'-OMe-nucleotide
  modified_base (21)..(21): Locked nucleic acid (LNA) nucleotide
  modified_base (22)..(22): Locked nucleic acid (LNA) nucleotide
tttgccagaguuaucgaggctt

SEQ ID NO: 1382 - DNA, 22 bp, Artificial Sequence
  source: /note="Description of Artificial Sequence: Synthetic oligonucleotide"
  source: /note="Description of Combined DNA/RNA Molecule: Synthetic oligonucleotide"
  modified_base (1)..(1): GalNAc-morpholino-thymidine analog 3
  misc_feature (1)..(2): /note="phosphorothioate bond"
  modified_base (2)..(2): GalNAc-morpholino-thymidine analog 3
  misc_feature (2)..(3): /note="phosphorothioate bond"
  modified_base (3)..(3): GalNAc-morpholino-thymidine analog 3
  modified_base (4)..(4): 2'-OMe-nucleotide
  modified_base (5)..(5): 2'-OMe-nucleotide
  modified_base (6)..(6): 2'-OMe-nucleotide
  modified_base (7)..(7): 2'-OMe-nucleotide
  modified_base (8)..(8): 2'-fluoro-nucleotide
  modified_base (9)..(9): 2'-OMe-nucleotide
  modified_base (10)..(10): 2'-fluoro-nucleotide
  modified_base (11)..(11): 2'-fluoro-nucleotide
  modified_base (12)..(12): 2'-fluoro-nucleotide
  modified_base (13)..(13): 2'-OMe-nucleotide
  modified_base (14)..(14): 2'-OMe-nucleotide
  modified_base (15)..(15): 2'-OMe-nucleotide
  modified_base (16)..(16): 2'-OMe-nucleotide
  modified_base (17)..(17): 2'-OMe-nucleotide
  modified_base (18)..(18): 2'-OMe-nucleotide
  modified_base (19)..(19): 2'-OMe-nucleotide
  modified_base (20)..(20): 2'-OMe-nucleotide
  misc_feature (20)..(21): /note="phosphorothioate bond"
  modified_base (21)..(21): Locked nucleic acid (LNA) nucleotide
  misc_feature (21)..(22): /note="phosphorothioate bond"
  modified_base (22)..(22): Locked nucleic acid (LNA) nucleotide
tttgccagaguuaucgaggctt

SEQ ID NO: 1383 - DNA, 22 bp, Artificial Sequence
  source: /note="Description of Artificial Sequence: Synthetic oligonucleotide"
  source: /note="Description of Combined DNA/RNA Molecule: Synthetic oligonucleotide"
  modified_base (1)..(1): GalNAc-morpholino-thymidine analog 3
  misc_feature (1)..(2): /note="phosphorothioate bond"
  modified_base (2)..(2): GalNAc-morpholino-thymidine analog 3
  misc_feature (2)..(3): /note="phosphorothioate bond"
  modified_base (3)..(3): GalNAc-morpholino-thymidine analog 3
  modified_base (4)..(4): 2'-OMe-nucleotide
  modified_base (5)..(5): 2'-OMe-nucleotide
  modified_base (6)..(6): 2'-OMe-nucleotide
  modified_base (7)..(7): 2'-OMe-nucleotide
  modified_base (8)..(8): 2'-fluoro-nucleotide
  modified_base (9)..(9): 2'-OMe-nucleotide
  modified_base (10)..(10): 2'-fluoro-nucleotide
  modified_base (11)..(11): 2'-fluoro-nucleotide
  modified_base (12)..(12): 2'-fluoro-nucleotide
  modified_base (13)..(13): 2'-OMe-nucleotide
  modified_base (14)..(14): 2'-OMe-nucleotide
  modified_base (15)..(15): 2'-OMe-nucleotide
  modified_base (16)..(16): 2'-OMe-nucleotide
  modified_base (17)..(17): 2'-OMe-nucleotide
  modified_base (18)..(18): 2'-OMe-nucleotide
  modified_base (19)..(19): 2'-OMe-nucleotide
  modified_base (20)..(20): 2'-OMe-nucleotide
  misc_feature (20)..(21): /note="phosphorothioate bond"
  modified_base (21)..(21): Locked nucleic acid (LNA) nucleotide
  misc_feature (21)..(22): /note="phosphorothioate bond"
  modified_base (22)..(22): Locked nucleic acid (LNA) nucleotide
tttgccagaguuaucgaggctt

SEQ ID NO: 1384 - DNA, 22 bp, Artificial Sequence
  source: /note="Description of Artificial Sequence: Synthetic oligonucleotide"
  source: /note="Description of Combined DNA/RNA Molecule: Synthetic oligonucleotide"
  modified_base (1)..(1): GalNAc-morpholino-thymidine analog 3
  misc_feature (1)..(2): /note="phosphorothioate bond"
  modified_base (2)..(2): GalNAc-morpholino-thymidine analog 3
  misc_feature (2)..(3): /note="phosphorothioate bond"
  modified_base (3)..(3): GalNAc-morpholino-thymidine analog 3
  modified_base (4)..(4): 2'-OMe-nucleotide
  modified_base (5)..(5): 2'-OMe-nucleotide
  modified_base (6)..(6): 2'-OMe-nucleotide
  modified_base (7)..(7): 2'-OMe-nucleotide
  modified_base (8)..(8): 2'-fluoro-nucleotide
  modified_base (9)..(9): 2'-OMe-nucleotide
  modified_base (10)..(10): 2'-fluoro-nucleotide
  modified_base (11)..(11): 2'-fluoro-nucleotide
  modified_base (12)..(12): 2'-fluoro-nucleotide
  modified_base (13)..(13): 2'-OMe-nucleotide
  modified_base (14)..(14): 2'-OMe-nucleotide
  modified_base (15)..(15): 2'-OMe-nucleotide
  modified_base (16)..(16): 2'-OMe-nucleotide
  modified_base (17)..(17): 2'-OMe-nucleotide
  modified_base (18)..(18): 2'-OMe-nucleotide
  modified_base (19)..(19): 2'-OMe-nucleotide
  modified_base (20)..(20): 2'-OMe-nucleotide
  misc_feature (20)..(21): /note="phosphorothioate bond"
  modified_base (21)..(21): Locked nucleic acid (LNA) nucleotide
  misc_feature (21)..(22): /note="phosphorothioate bond"
  modified_base (22)..(22): Locked nucleic acid (LNA) nucleotide
tttgccagaguuaucgaggctt

SEQ ID NO: 1385 - DNA, 22 bp, Artificial Sequence
  source: /note="Description of Artificial Sequence: Synthetic oligonucleotide"
  source: /note="Description of Combined DNA/RNA Molecule: Synthetic oligonucleotide"
  modified_base (1)..(1): GalNAc-morpholino-thymidine analog 3
  misc_feature (1)..(2): /note="phosphorothioate bond"
  modified_base (2)..(2): GalNAc-morpholino-thymidine analog 3
  misc_feature (2)..(3): /note="phosphorothioate bond"
  modified_base (3)..(3): GalNAc-morpholino-thymidine analog 3
  modified_base (4)..(4): 2'-OMe-nucleotide
  modified_base (5)..(5): 2'-OMe-nucleotide
  modified_base (6)..(6): 2'-OMe-nucleotide
  modified_base (7)..(7): 2'-OMe-nucleotide
  modified_base (8)..(8): 2'-fluoro-nucleotide
  modified_base (9)..(9): 2'-OMe-nucleotide
  modified_base (10)..(10): 2'-fluoro-nucleotide
  modified_base (11)..(11): 2'-fluoro-nucleotide
  modified_base (12)..(12): 2'-fluoro-nucleotide
  modified_base (13)..(13): 2'-OMe-nucleotide
  modified_base (14)..(14): 2'-OMe-nucleotide
  modified_base (15)..(15): 2'-OMe-nucleotide
  modified_base (16)..(16): 2'-OMe-nucleotide
  modified_base (17)..(17): 2'-OMe-nucleotide
  modified_base (18)..(18): 2'-OMe-nucleotide
  modified_base (19)..(19): 2'-OMe-nucleotide
  modified_base (20)..(20): 2'-OMe-nucleotide
  misc_feature (20)..(21): /note="phosphorothioate bond"
  modified_base (21)..(21): Locked nucleic acid (LNA) nucleotide
  misc_feature (21)..(22): /note="phosphorothioate bond"
  modified_base (22)..(22): Locked nucleic acid (LNA) nucleotide
tttgccagaguuaucgaggctt

SEQ ID NO: 1386 - DNA, 22 bp, Artificial Sequence
  source: /note="Description of Artificial Sequence: Synthetic oligonucleotide"
  source: /note="Description of Combined DNA/RNA Molecule: Synthetic oligonucleotide"
  modified_base (1)..(1): GalNAc-morpholino-thymidine analog 3
  misc_feature (1)..(2): /note="phosphorothioate bond"
  modified_base (2)..(2): GalNAc-morpholino-thymidine analog 3
  misc_feature (2)..(3): /note="phosphorothioate bond"
  modified_base (3)..(3): GalNAc-morpholino-thymidine analog 3
  modified_base (4)..(4): 2'-OMe-nucleotide
  modified_base (5)..(5): 2'-OMe-nucleotide
  modified_base (6)..(6): 2'-OMe-nucleotide
  modified_base (7)..(7): 2'-OMe-nucleotide
  modified_base (8)..(8): 2'-fluoro-nucleotide
  modified_base (9)..(9): 2'-OMe-nucleotide
  modified_base (10)..(10): 2'-fluoro-nucleotide
  modified_base (11)..(11): 2'-fluoro-nucleotide
  modified_base (12)..(12): 2'-fluoro-nucleotide
  modified_base (13)..(13): 2'-OMe-nucleotide
  modified_base (14)..(14): 2'-OMe-nucleotide
  modified_base (15)..(15): 2'-OMe-nucleotide
  modified_base (16)..(16): 2'-OMe-nucleotide
  modified_base (17)..(17): 2'-OMe-nucleotide
  modified_base (18)..(18): 2'-OMe-nucleotide
  modified_base (19)..(19): 2'-OMe-nucleotide
  modified_base (20)..(20): 2'-OMe-nucleotide
  misc_feature (20)..(21): /note="phosphorothioate bond"
  modified_base (21)..(21): Locked nucleic acid (LNA) nucleotide
  misc_feature (21)..(22): /note="phosphorothioate bond"
  modified_base (22)..(22): Locked nucleic acid (LNA) nucleotide
tttgccagaguuaucgaggctt

SEQ ID NO: 1387 - DNA, 22 bp, Artificial Sequence
  source: /note="Description of Artificial Sequence: Synthetic oligonucleotide"
  source: /note="Description of Combined DNA/RNA Molecule: Synthetic oligonucleotide"
  modified_base (1)..(1): GalNAc-morpholino-thymidine analog 3
  misc_feature (1)..(2): /note="phosphorothioate bond"
  modified_base (2)..(2): GalNAc-morpholino-thymidine analog 3
  misc_feature (2)..(3): /note="phosphorothioate bond"
  modified_base (3)..(3): GalNAc-morpholino-thymidine analog 3
  modified_base (4)..(4): 2'-OMe-nucleotide
  modified_base (5)..(5): 2'-OMe-nucleotide
  modified_base (6)..(6): 2'-OMe-nucleotide
  modified_base (7)..(7): 2'-OMe-nucleotide
  modified_base (8)..(8): 2'-fluoro-nucleotide
  modified_base (9)..(9): 2'-OMe-nucleotide
  modified_base (10)..(10): 2'-fluoro-nucleotide
  modified_base (11)..(11): 2'-fluoro-nucleotide
  modified_base (12)..(12): 2'-fluoro-nucleotide
  modified_base (13)..(13): 2'-OMe-nucleotide
  modified_base (14)..(14): 2'-OMe-nucleotide
  modified_base (15)..(15): 2'-OMe-nucleotide
  modified_base (16)..(16): 2'-OMe-nucleotide
  modified_base (17)..(17): 2'-OMe-nucleotide
  modified_base (18)..(18): 2'-OMe-nucleotide
  modified_base (19)..(19): 2'-OMe-nucleotide
  modified_base (20)..(20): 2'-OMe-nucleotide
  misc_feature (20)..(21): /note="phosphorothioate bond"
  modified_base (21)..(21): Locked nucleic acid (LNA) nucleotide
  misc_feature (21)..(22): /note="phosphorothioate bond"
  modified_base (22)..(22): Locked nucleic acid (LNA) nucleotide
tttgccagaguuaucgaggctt

SEQ ID NO: 1388 - DNA, 22 bp, Artificial Sequence
  source: /note="Description of Artificial Sequence: Synthetic oligonucleotide"
  source: /note="Description of Combined DNA/RNA Molecule: Synthetic oligonucleotide"
  modified_base (1)..(1): GalNAc-morpholino-thymidine analog 3
  misc_feature (1)..(2): /note="phosphorothioate bond"
  modified_base (2)..(2): GalNAc-morpholino-thymidine analog 3
  misc_feature (2)..(3): /note="phosphorothioate bond"
  modified_base (3)..(3): GalNAc-morpholino-thymidine analog 3
  modified_base (4)..(4): 2'-OMe-nucleotide
  modified_base (5)..(5): 2'-OMe-nucleotide
  modified_base (6)..(6): 2'-OMe-nucleotide
  modified_base (7)..(7): 2'-OMe-nucleotide
  modified_base (8)..(8): 2'-fluoro-nucleotide
  modified_base (9)..(9): 2'-OMe-nucleotide
  modified_base (10)..(10): 2'-fluoro-nucleotide
  modified_base (11)..(11): 2'-fluoro-nucleotide
  modified_base (12)..(12): 2'-fluoro-nucleotide
  modified_base (13)..(13): 2'-OMe-nucleotide
  modified_base (14)..(14): 2'-OMe-nucleotide
  modified_base (15)..(15): 2'-OMe-nucleotide
  modified_base (16)..(16): 2'-OMe-nucleotide
  modified_base (17)..(17): 2'-OMe-nucleotide
  modified_base (18)..(18): 2'-OMe-nucleotide
  modified_base (19)..(19): 2'-OMe-nucleotide
  modified_base (20)..(20): 2'-OMe-nucleotide
  misc_feature (20)..(21): /note="phosphorothioate bond"
  modified_base (21)..(21): Locked nucleic acid (LNA) nucleotide
  misc_feature (21)..(22): /note="phosphorothioate bond"
  modified_base (22)..(22): Locked nucleic acid (LNA) nucleotide
tttgccagaguuaucgaggctt

SEQ ID NO: 1389 - DNA, 22 bp, Artificial Sequence
  source: /note="Description of Artificial Sequence: Synthetic oligonucleotide"
  source: /note="Description of Combined DNA/RNA Molecule: Synthetic oligonucleotide"
  modified_base (1)..(1): GalNAc-morpholino-thymidine analog 3
  misc_feature (1)..(2): /note="phosphorothioate bond"
  modified_base (2)..(2): GalNAc-morpholino-thymidine analog 3
  misc_feature (2)..(3): /note="phosphorothioate bond"
  modified_base (3)..(3): GalNAc-morpholino-thymidine analog 3
  modified_base (4)..(4): 2'-OMe-nucleotide
  modified_base (5)..(5): 2'-OMe-nucleotide
  modified_base (6)..(6): 2'-OMe-nucleotide
  modified_base (7)..(7): 2'-OMe-nucleotide
  modified_base (8)..(8): 2'-fluoro-nucleotide
  modified_base (9)..(9): 2'-OMe-nucleotide
  modified_base (10)..(10): 2'-fluoro-nucleotide
  modified_base (11)..(11): 2'-fluoro-nucleotide
  modified_base (12)..(12): 2'-fluoro-nucleotide
  modified_base (13)..(13): 2'-OMe-nucleotide
  modified_base (14)..(14): 2'-OMe-nucleotide
  modified_base (15)..(15): 2'-OMe-nucleotide
  modified_base (16)..(16): 2'-OMe-nucleotide
  modified_base (17)..(17): 2'-OMe-nucleotide
  modified_base (18)..(18): 2'-OMe-nucleotide
  modified_base (19)..(19): 2'-OMe-nucleotide
  modified_base (20)..(20): 2'-OMe-nucleotide
  misc_feature (20)..(21): /note="phosphorothioate bond"
  modified_base (21)..(21): Locked nucleic acid (LNA) nucleotide
  misc_feature (21)..(22): /note="phosphorothioate bond"
  modified_base (22)..(22): Locked nucleic acid (LNA) nucleotide
tttgccagaguuaucgaggctt

SEQ ID NO: 1390 - DNA, 22 bp, Artificial Sequence
  source: /note="Description of Artificial Sequence: Synthetic oligonucleotide"
  source: /note="Description of Combined DNA/RNA Molecule: Synthetic oligonucleotide"
  modified_base (1)..(1): GalNAc-morpholino-thymidine analog 3
  misc_feature (1)..(2): /note="phosphorothioate bond"
  modified_base (2)..(2): GalNAc-morpholino-thymidine analog 3
  misc_feature (2)..(3): /note="phosphorothioate bond"
  modified_base (3)..(3): GalNAc-morpholino-thymidine analog 3
  modified_base (4)..(4): 2'-OMe-nucleotide
  modified_base (5)..(5): 2'-OMe-nucleotide
  modified_base (6)..(6): 2'-OMe-nucleotide
  modified_base (7)..(7): 2'-OMe-nucleotide
  modified_base (8)..(8): 2'-fluoro-nucleotide
  modified_base (9)..(9): 2'-OMe-nucleotide
  modified_base (10)..(10): 2'-fluoro-nucleotide
  modified_base (11)..(11): 2'-fluoro-nucleotide
  modified_base (12)..(12): 2'-fluoro-nucleotide
  modified_base (13)..(13): 2'-OMe-nucleotide
  modified_base (14)..(14): 2'-OMe-nucleotide
  modified_base (15)..(15): 2'-OMe-nucleotide
  modified_base (16)..(16): 2'-OMe-nucleotide
  modified_base (17)..(17): 2'-OMe-nucleotide
  modified_base (18)..(18): 2'-OMe-nucleotide
  modified_base (19)..(19): 2'-OMe-nucleotide
  modified_base (20)..(20): 2'-OMe-nucleotide
  misc_feature (20)..(21): /note="phosphorothioate bond"
  modified_base (21)..(21): Locked nucleic acid (LNA) nucleotide
  misc_feature (21)..(22): /note="phosphorothioate bond"
  modified_base (22)..(22): Locked nucleic acid (LNA) nucleotide
tttgccagaguuaucgaggctt

SEQ ID NO: 1391 - DNA, 22 bp, Artificial Sequence
  source: /note="Description of Artificial Sequence: Synthetic oligonucleotide"
  source: /note="Description of Combined DNA/RNA Molecule: Synthetic oligonucleotide"
  modified_base (1)..(1): GalNAc-morpholino-thymidine analog 3
  modified_base (2)..(2): GalNAc-morpholino-thymidine analog 3
  modified_base (3)..(3): GalNAc-morpholino-thymidine analog 3
  modified_base (4)..(4): Locked nucleic acid (LNA) nucleotide
  modified_base (5)..(5): Locked nucleic acid (LNA) nucleotide
  modified_base (6)..(6): 2'-OMe-nucleotide
  modified_base (7)..(7): 2'-OMe-nucleotide
  modified_base (8)..(8): 2'-fluoro-nucleotide
  modified_base (9)..(9): 2'-OMe-nucleotide
  modified_base (10)..(10): 2'-fluoro-nucleotide
  modified_base (11)..(11): 2'-fluoro-nucleotide
  modified_base (12)..(12): 2'-fluoro-nucleotide
  modified_base (13)..(13): 2'-OMe-nucleotide
  modified_base (14)..(14): 2'-OMe-nucleotide
  modified_base (15)..(15): 2'-OMe-nucleotide
  modified_base (16)..(16): 2'-OMe-nucleotide
  modified_base (17)..(17): 2'-OMe-nucleotide
  modified_base (18)..(18): 2'-OMe-nucleotide
  modified_base (19)..(19): 2'-OMe-nucleotide
  modified_base (20)..(20): 2'-OMe-nucleotide
  modified_base (21)..(21): Locked nucleic acid (LNA) nucleotide
  modified_base (22)..(22): Locked nucleic acid (LNA) nucleotide
tttgccagaguuaucgaggctt

SEQ ID NO: 1392 - DNA, 22 bp, Artificial Sequence
  source: /note="Description of Artificial Sequence: Synthetic oligonucleotide"
  source: /note="Description of Combined DNA/RNA Molecule: Synthetic oligonucleotide"
  modified_base (1)..(1): GalNAc-morpholino-thymidine analog 3
  modified_base (2)..(2): GalNAc-morpholino-thymidine analog 3
  modified_base (3)..(3): GalNAc-morpholino-thymidine analog 3
  modified_base (4)..(4): Locked nucleic acid (LNA) nucleotide
  modified_base (5)..(5): Locked nucleic acid (LNA) nucleotide
  modified_base (6)..(6): 2'-OMe-nucleotide
  modified_base (7)..(7): 2'-OMe-nucleotide
  modified_base (8)..(8): 2'-fluoro-nucleotide
  modified_base (9)..(9): 2'-OMe-nucleotide
  modified_base (10)..(10): 2'-fluoro-nucleotide
  modified_base (11)..(11): 2'-fluoro-nucleotide
  modified_base (12)..(12): 2'-fluoro-nucleotide
  modified_base (13)..(13): 2'-OMe-nucleotide
  modified_base (14)..(14): 2'-OMe-nucleotide
  modified_base (15)..(15): 2'-OMe-nucleotide
  modified_base (16)..(16): 2'-OMe-nucleotide
  modified_base (17)..(17): 2'-OMe-nucleotide
  modified_base (18)..(18): 2'-OMe-nucleotide
  modified_base (19)..(19): 2'-OMe-nucleotide
  modified_base (20)..(20): 2'-OMe-nucleotide
  modified_base (21)..(21): Locked nucleic acid (LNA) nucleotide
  modified_base (22)..(22): Locked nucleic acid (LNA) nucleotide
tttgccagaguuaucgaggctt

SEQ ID NO: 1393 - DNA, 22 bp, Artificial Sequence
  source: /note="Description of Artificial Sequence: Synthetic oligonucleotide"
  source: /note="Description of Combined DNA/RNA Molecule: Synthetic oligonucleotide"
  modified_base (1)..(1): GalNAc-morpholino-thymidine analog 3
  modified_base (2)..(2): GalNAc-morpholino-thymidine analog 3
  modified_base (3)..(3): GalNAc-morpholino-thymidine analog 3
  modified_base (4)..(4): Locked nucleic acid (LNA) nucleotide
  modified_base (5)..(5): Locked nucleic acid (LNA) nucleotide
  modified_base (6)..(6): 2'-OMe-nucleotide
  modified_base (7)..(7): 2'-OMe-nucleotide
  modified_base (8)..(8): 2'-fluoro-nucleotide
  modified_base (9)..(9): 2'-OMe-nucleotide
  modified_base (10)..(10): 2'-fluoro-nucleotide
  modified_base (11)..(11): 2'-fluoro-nucleotide
  modified_base (12)..(12): 2'-fluoro-nucleotide
  modified_base (13)..(13): 2'-OMe-nucleotide
  modified_base (14)..(14): 2'-OMe-nucleotide
  modified_base (15)..(15): 2'-OMe-nucleotide
  modified_base (16)..(16): 2'-OMe-nucleotide
  modified_base (17)..(17): 2'-OMe-nucleotide
  modified_base (18)..(18): 2'-OMe-nucleotide
  modified_base (19)..(19): 2'-OMe-nucleotide
  modified_base (20)..(20): 2'-OMe-nucleotide
  modified_base (21)..(21): Locked nucleic acid (LNA) nucleotide
  modified_base (22)..(22): Locked nucleic acid (LNA) nucleotide
tttgccagaguuaucgaggctt

SEQ ID NO: 1394 - DNA, 22 bp, Artificial Sequence
  source: /note="Description of Artificial Sequence: Synthetic oligonucleotide"
  source: /note="Description of Combined DNA/RNA Molecule: Synthetic oligonucleotide"
  modified_base (1)..(1): GalNAc-morpholino-thymidine analog 3
  modified_base (2)..(2): GalNAc-morpholino-thymidine analog 3
  modified_base (3)..(3): GalNAc-morpholino-thymidine analog 3
  modified_base (4)..(4): Locked nucleic acid (LNA) nucleotide
  modified_base (5)..(5): Locked nucleic acid (LNA) nucleotide
  modified_base (6)..(6): 2'-OMe-nucleotide
  modified_base (7)..(7): 2'-OMe-nucleotide
  modified_base (8)..(8): 2'-fluoro-nucleotide
  modified_base (9)..(9): 2'-OMe-nucleotide
  modified_base (10)..(10): 2'-fluoro-nucleotide
  modified_base (11)..(11): 2'-fluoro-nucleotide
  modified_base (12)..(12): 2'-fluoro-nucleotide
  modified_base (13)..(13): 2'-OMe-nucleotide
  modified_base (14)..(14): 2'-OMe-nucleotide
  modified_base (15)..(15): 2'-OMe-nucleotide
  modified_base (16)..(16): 2'-OMe-nucleotide
  modified_base (17)..(17): 2'-OMe-nucleotide
  modified_base (18)..(18): 2'-OMe-nucleotide
  modified_base (19)..(19): 2'-OMe-nucleotide
  modified_base (20)..(20): 2'-OMe-nucleotide
  modified_base (21)..(21): Locked nucleic acid (LNA) nucleotide
  modified_base (22)..(22): Locked nucleic acid (LNA) nucleotide
tttgccagaguuaucgaggctt

SEQ ID NO: 1395 - DNA, 22 bp, Artificial Sequence
  source: /note="Description of Artificial Sequence: Synthetic oligonucleotide"
  source: /note="Description of Combined DNA/RNA Molecule: Synthetic oligonucleotide"
  modified_base (1)..(1): GalNAc-morpholino-thymidine analog 3
  modified_base (2)..(2): GalNAc-morpholino-thymidine analog 3
  modified_base (3)..(3): GalNAc-morpholino-thymidine analog 3
  modified_base (4)..(4): Locked nucleic acid (LNA) nucleotide
  modified_base (5)..(5): Locked nucleic acid (LNA) nucleotide
  modified_base (6)..(6): 2'-OMe-nucleotide
  modified_base (7)..(7): 2'-OMe-nucleotide
  modified_base (8)..(8): 2'-fluoro-nucleotide
  modified_base (9)..(9): 2'-OMe-nucleotide
  modified_base (10)..(10): 2'-fluoro-nucleotide
  modified_base (11)..(11): 2'-fluoro-nucleotide
  modified_base (12)..(12): 2'-fluoro-nucleotide
  modified_base (13)..(13): 2'-OMe-nucleotide
  modified_base (14)..(14): 2'-OMe-nucleotide
  modified_base (15)..(15): 2'-OMe-nucleotide
  modified_base (16)..(16): 2'-OMe-nucleotide
  modified_base (17)..(17): 2'-OMe-nucleotide
  modified_base (18)..(18): 2'-OMe-nucleotide
  modified_base (19)..(19): 2'-OMe-nucleotide
  modified_base (20)..(20): 2'-OMe-nucleotide
  modified_base (21)..(21): Locked nucleic acid (LNA) nucleotide
  modified_base (22)..(22): Locked nucleic acid (LNA) nucleotide
tttgccagaguuaucgaggctt

SEQ ID NO: 1396 - DNA, 22 bp, Artificial Sequence
  source: /note="Description of Artificial Sequence: Synthetic oligonucleotide"
  source: /note="Description of Combined DNA/RNA Molecule: Synthetic oligonucleotide"
  modified_base (1)..(1): GalNAc-morpholino-thymidine analog 3
  misc_feature (1)..(2): /note="phosphorothioate bond"
  modified_base (2)..(2): GalNAc-morpholino-thymidine analog 3
  misc_feature (2)..(3): /note="phosphorothioate bond"
  modified_base (3)..(3): GalNAc-morpholino-thymidine analog 3
  modified_base (4)..(4): Locked nucleic acid (LNA) nucleotide
  modified_base (5)..(5): Locked nucleic acid (LNA) nucleotide
  modified_base (6)..(6): 2'-OMe-nucleotide
  modified_base (7)..(7): 2'-OMe-nucleotide
  modified_base (8)..(8): 2'-fluoro-nucleotide
  modified_base (9)..(9): 2'-OMe-nucleotide
  modified_base (10)..(10): 2'-fluoro-nucleotide
  modified_base (11)..(11): 2'-fluoro-nucleotide
  modified_base (12)..(12): 2'-fluoro-nucleotide
  modified_base (13)..(13): 2'-OMe-nucleotide
  modified_base (14)..(14): 2'-OMe-nucleotide
  modified_base (15)..(15): 2'-OMe-nucleotide
  modified_base (16)..(16): 2'-OMe-nucleotide
  modified_base (17)..(17): 2'-OMe-nucleotide
  modified_base (18)..(18): 2'-OMe-nucleotide
  modified_base (19)..(19): 2'-OMe-nucleotide
  modified_base (20)..(20): 2'-OMe-nucleotide
  misc_feature (20)..(21): /note="phosphorothioate bond"
  modified_base (21)..(21): Locked nucleic acid (LNA) nucleotide
  misc_feature (21)..(22): /note="phosphorothioate bond"
  modified_base (22)..(22): Locked nucleic acid (LNA) nucleotide
tttgccagaguuaucgaggctt

SEQ ID NO: 1397 - DNA, 22 bp, Artificial Sequence
  source: /note="Description of Artificial Sequence: Synthetic oligonucleotide"
  source: /note="Description of Combined DNA/RNA Molecule: Synthetic oligonucleotide"
  modified_base (1)..(1): GalNAc-morpholino-thymidine analog 3
  misc_feature (1)..(2): /note="phosphorothioate bond"
  modified_base (2)..(2): GalNAc-morpholino-thymidine analog 3
  misc_feature (2)..(3): /note="phosphorothioate bond"
  modified_base (3)..(3): GalNAc-morpholino-thymidine analog 3
  modified_base (4)..(4): Locked nucleic acid (LNA) nucleotide
  modified_base (5)..(5): Locked nucleic acid (LNA) nucleotide
  modified_base (6)..(6): 2'-OMe-nucleotide
  modified_base (7)..(7): 2'-OMe-nucleotide
  modified_base (8)..(8): 2'-fluoro-nucleotide
  modified_base (9)..(9): 2'-OMe-nucleotide
  modified_base (10)..(10): 2'-fluoro-nucleotide
  modified_base (11)..(11): 2'-fluoro-nucleotide
  modified_base (12)..(12): 2'-fluoro-nucleotide
  modified_base (13)..(13): 2'-OMe-nucleotide
  modified_base (14)..(14): 2'-OMe-nucleotide
  modified_base (15)..(15): 2'-OMe-nucleotide
  modified_base (16)..(16): 2'-OMe-nucleotide
  modified_base (17)..(17): 2'-OMe-nucleotide
  modified_base (18)..(18): 2'-OMe-nucleotide
  modified_base (19)..(19): 2'-OMe-nucleotide
  modified_base (20)..(20): 2'-OMe-nucleotide
  misc_feature (20)..(21): /note="phosphorothioate bond"
  modified_base (21)..(21): Locked nucleic acid (LNA) nucleotide
  misc_feature (21)..(22): /note="phosphorothioate bond"
  modified_base (22)..(22): Locked nucleic acid (LNA) nucleotide
tttgccagaguuaucgaggctt

SEQ ID NO: 1398 - DNA, 22 bp, Artificial Sequence
  source: /note="Description of Artificial Sequence: Synthetic oligonucleotide"
  source: /note="Description of Combined DNA/RNA Molecule: Synthetic oligonucleotide"
  modified_base (1)..(1): GalNAc-morpholino-thymidine analog 3
  misc_feature (1)..(2): /note="phosphorothioate bond"
  modified_base (2)..(2): GalNAc-morpholino-thymidine analog 3
  misc_feature (2)..(3): /note="phosphorothioate bond"
  modified_base (3)..(3): GalNAc-morpholino-thymidine analog 3
  modified_base (4)..(4): Locked nucleic acid (LNA) nucleotide
  modified_base (5)..(5): Locked nucleic acid (LNA) nucleotide
  modified_base (6)..(6): 2'-OMe-nucleotide
  modified_base (7)..(7): 2'-OMe-nucleotide
  modified_base (8)..(8): 2'-fluoro-nucleotide
  modified_base (9)..(9): 2'-OMe-nucleotide
  modified_base (10)..(10): 2'-fluoro-nucleotide
  modified_base (11)..(11): 2'-fluoro-nucleotide
  modified_base (12)..(12): 2'-fluoro-nucleotide
  modified_base (13)..(13): 2'-OMe-nucleotide
  modified_base (14)..(14): 2'-OMe-nucleotide
  modified_base (15)..(15): 2'-OMe-nucleotide
  modified_base (16)..(16): 2'-OMe-nucleotide
  modified_base (17)..(17): 2'-OMe-nucleotide
  modified_base (18)..(18): 2'-OMe-nucleotide
  modified_base (19)..(19): 2'-OMe-nucleotide
  modified_base (20)..(20): 2'-OMe-nucleotide
  misc_feature (20)..(21): /note="phosphorothioate bond"
  modified_base (21)..(21): Locked nucleic acid (LNA) nucleotide
  misc_feature (21)..(22): /note="phosphorothioate bond"
  modified_base (22)..(22): Locked nucleic acid (LNA) nucleotide
tttgccagaguuaucgaggctt

SEQ ID NO: 1399 - DNA, 22 bp, Artificial Sequence
  source: /note="Description of Artificial Sequence: Synthetic oligonucleotide"
  source: /note="Description of Combined DNA/RNA Molecule: Synthetic oligonucleotide"
  modified_base (1)..(1): GalNAc-morpholino-thymidine analog 3
  misc_feature (1)..(2): /note="phosphorothioate bond"
  modified_base (2)..(2): GalNAc-morpholino-thymidine analog 3
  misc_feature (2)..(3): /note="phosphorothioate bond"
  modified_base (3)..(3): GalNAc-morpholino-thymidine analog 3
  modified_base (4)..(4): Locked nucleic acid (LNA) nucleotide
  modified_base (5)..(5): Locked nucleic acid (LNA) nucleotide
  modified_base (6)..(6): 2'-OMe-nucleotide
  modified_base (7)..(7): 2'-OMe-nucleotide
  modified_base (8)..(8): 2'-fluoro-nucleotide
  modified_base (9)..(9): 2'-OMe-nucleotide
  modified_base (10)..(10): 2'-fluoro-nucleotide
  modified_base (11)..(11): 2'-fluoro-nucleotide
  modified_base (12)..(12): 2'-fluoro-nucleotide
  modified_base (13)..(13): 2'-OMe-nucleotide
  modified_base (14)..(14): 2'-OMe-nucleotide
  modified_base (15)..(15): 2'-OMe-nucleotide
  modified_base (16)..(16): 2'-OMe-nucleotide
  modified_base (17)..(17): 2'-OMe-nucleotide
  modified_base (18)..(18): 2'-OMe-nucleotide
  modified_base (19)..(19): 2'-OMe-nucleotide
  modified_base (20)..(20): 2'-OMe-nucleotide
  misc_feature (20)..(21): /note="phosphorothioate bond"
  modified_base (21)..(21): Locked nucleic acid (LNA) nucleotide
  misc_feature (21)..(22): /note="phosphorothioate bond"
  modified_base (22)..(22): Locked nucleic acid (LNA) nucleotide
tttgccagaguuaucgaggctt

SEQ ID NO: 1400 - DNA, 22 bp, Artificial Sequence
  source: /note="Description of Artificial Sequence: Synthetic oligonucleotide"
  source: /note="Description of Combined DNA/RNA Molecule: Synthetic oligonucleotide"
  modified_base (1)..(1): GalNAc-morpholino-thymidine analog 3
  misc_feature (1)..(2): /note="phosphorothioate bond"
  modified_base (2)..(2): GalNAc-morpholino-thymidine analog 3
  misc_feature (2)..(3): /note="phosphorothioate bond"
  modified_base (3)..(3): GalNAc-morpholino-thymidine analog 3
  modified_base (4)..(4): Locked nucleic acid (LNA) nucleotide
  modified_base (5)..(5): Locked nucleic acid (LNA) nucleotide
  modified_base (6)..(6): 2'-OMe-nucleotide
  modified_base (7)..(7): 2'-OMe-nucleotide
  modified_base (8)..(8): 2'-fluoro-nucleotide
  modified_base (9)..(9): 2'-OMe-nucleotide
  modified_base (10)..(10): 2'-fluoro-nucleotide
  modified_base (11)..(11): 2'-fluoro-nucleotide
  modified_base (12)..(12): 2'-fluoro-nucleotide
  modified_base (13)..(13): 2'-OMe-nucleotide
  modified_base (14)..(14): 2'-OMe-nucleotide
  modified_base (15)..(15): 2'-OMe-nucleotide
  modified_base (16)..(16): 2'-OMe-nucleotide
  modified_base (17)..(17): 2'-OMe-nucleotide
  modified_base (18)..(18): 2'-OMe-nucleotide
  modified_base (19)..(19): 2'-OMe-nucleotide
  modified_base (20)..(20): 2'-OMe-nucleotide
  misc_feature (20)..(21): /note="phosphorothioate bond"
  modified_base (21)..(21): Locked nucleic acid (LNA) nucleotide
  misc_feature (21)..(22): /note="phosphorothioate bond"
  modified_base (22)..(22): Locked nucleic acid (LNA) nucleotide
tttgccagaguuaucgaggctt

SEQ ID NO: 1401 - DNA, 24 bp, Artificial Sequence
  source: /note="Description of Artificial Sequence: Synthetic oligonucleotide"
  source: /note="Description of Combined DNA/RNA Molecule: Synthetic oligonucleotide"
  modified_base (1)..(1): GalNAc-morpholino-thymidine analog 3
  modified_base (2)..(2): GalNAc-morpholino-thymidine analog 3
  modified_base (3)..(3): GalNAc-morpholino-thymidine analog 3
  modified_base (4)..(4): 2'-OMe-nucleotide
  modified_base (5)..(5): 2'-OMe-nucleotide
  modified_base (6)..(6): 2'-OMe-nucleotide
  modified_base (7)..(7): 2'-OMe-nucleotide
  modified_base (8)..(8): 2'-fluoro-nucleotide
  modified_base (9)..(9): 2'-OMe-nucleotide
  modified_base (10)..(10): 2'-fluoro-nucleotide
  modified_base (11)..(11): 2'-fluoro-nucleotide
  modified_base (12)..(12): 2'-fluoro-nucleotide
  modified_base (13)..(13): 2'-OMe-nucleotide
  modified_base (14)..(14): 2'-OMe-nucleotide
  modified_base (15)..(15): 2'-OMe-nucleotide
  modified_base (16)..(16): 2'-OMe-nucleotide
  modified_base (17)..(17): 2'-OMe-nucleotide
  modified_base (18)..(18): 2'-OMe-nucleotide
  modified_base (19)..(19): 2'-OMe-nucleotide
  modified_base (20)..(20): 2'-OMe-nucleotide
  modified_base (21)..(21): 2'-OMe-nucleotide
  modified_base (22)..(22): 2'-OMe-nucleotide
  modified_base (23)..(23): Locked nucleic acid (LNA) nucleotide
  modified_base (24)..(24): Locked nucleic acid (LNA) nucleotide
tttgccagaguuaucgaggcactt

SEQ ID NO: 1402 - DNA, 24 bp, Artificial Sequence
  source: /note="Description of Artificial Sequence: Synthetic oligonucleotide"
  source: /note="Description of Combined DNA/RNA Molecule: Synthetic oligonucleotide"
  modified_base (1)..(1): GalNAc-morpholino-thymidine analog 3
  modified_base (2)..(2): GalNAc-morpholino-thymidine analog 3
  modified_base (3)..(3): GalNAc-morpholino-thymidine analog 3
  modified_base (4)..(4): 2'-OMe-nucleotide
  modified_base (5)..(5): 2'-OMe-nucleotide
  modified_base (6)..(6): 2'-OMe-nucleotide
  modified_base (7)..(7): 2'-OMe-nucleotide
  modified_base (8)..(8): 2'-fluoro-nucleotide
  modified_base (9)..(9): 2'-OMe-nucleotide
  modified_base (10)..(10): 2'-fluoro-nucleotide
  modified_base (11)..(11): 2'-fluoro-nucleotide
  modified_base (12)..(12): 2'-fluoro-nucleotide
  modified_base (13)..(13): 2'-OMe-nucleotide
  modified_base (14)..(14): 2'-OMe-nucleotide
  modified_base (15)..(15): 2'-OMe-nucleotide
  modified_base (16)..(16): 2'-OMe-nucleotide
  modified_base (17)..(17): 2'-OMe-nucleotide
  modified_base (18)..(18): 2'-OMe-nucleotide
  modified_base (19)..(19): 2'-OMe-nucleotide
  modified_base (20)..(20): 2'-OMe-nucleotide
  modified_base (21)..(21): 2'-OMe-nucleotide
  modified_base (22)..(22): 2'-OMe-nucleotide
  modified_base (23)..(23): Locked nucleic acid (LNA) nucleotide
  modified_base (24)..(24): Locked nucleic acid (LNA) nucleotide
tttgccagaguuaucgaggcactt

SEQ ID NO: 1403 - DNA, 24 bp, Artificial Sequence
  source: /note="Description of Artificial Sequence: Synthetic oligonucleotide"
  source: /note="Description of Combined DNA/RNA Molecule: Synthetic oligonucleotide"
  modified_base (1)..(1): GalNAc-morpholino-thymidine analog 3
  modified_base (2)..(2): GalNAc-morpholino-thymidine analog 3
  modified_base (3)..(3): GalNAc-morpholino-thymidine analog 3
  modified_base (4)..(4): 2'-OMe-nucleotide
  modified_base (5)..(5): 2'-OMe-nucleotide
  modified_base (6)..(6): 2'-OMe-nucleotide
  modified_base (7)..(7): 2'-OMe-nucleotide
  modified_base (8)..(8): 2'-fluoro-nucleotide
  modified_base (9)..(9): 2'-OMe-nucleotide
  modified_base (10)..(10): 2'-fluoro-nucleotide
  modified_base (11)..(11): 2'-fluoro-nucleotide
  modified_base (12)..(12): 2'-fluoro-nucleotide
  modified_base (13)..(13): 2'-OMe-nucleotide
  modified_base (14)..(14): 2'-OMe-nucleotide
  modified_base (15)..(15): 2'-OMe-nucleotide
  modified_base (16)..(16): 2'-OMe-nucleotide
  modified_base (17)..(17): 2'-OMe-nucleotide
  modified_base (18)..(18): 2'-OMe-nucleotide
  modified_base (19)..(19): 2'-OMe-nucleotide
  modified_base (20)..(20): 2'-OMe-nucleotide
  modified_base (21)..(21): 2'-OMe-nucleotide
  modified_base (22)..(22): 2'-OMe-nucleotide
  modified_base (23)..(23): Locked nucleic acid (LNA) nucleotide
  modified_base (24)..(24): Locked nucleic acid (LNA) nucleotide
tttgccagaguuaucgaggcactt

SEQ ID NO: 1404 - DNA, 24 bp, Artificial Sequence
  source: /note="Description of Artificial Sequence: Synthetic oligonucleotide"
  source: /note="Description of Combined DNA/RNA Molecule: Synthetic oligonucleotide"
  modified_base (1)..(1): GalNAc-morpholino-thymidine analog 3
  modified_base (2)..(2): GalNAc-morpholino-thymidine analog 3
  modified_base (3)..(3): GalNAc-morpholino-thymidine analog 3
  modified_base (4)..(4): 2'-OMe-nucleotide
  modified_base (5)..(5): 2'-OMe-nucleotide
  modified_base (6)..(6): 2'-OMe-nucleotide
  modified_base (7)..(7): 2'-OMe-nucleotide
  modified_base (8)..(8): 2'-fluoro-nucleotide
  modified_base (9)..(9): 2'-OMe-nucleotide
  modified_base (10)..(10): 2'-fluoro-nucleotide
  modified_base (11)..(11): 2'-fluoro-nucleotide
  modified_base (12)..(12): 2'-fluoro-nucleotide
  modified_base (13)..(13): 2'-OMe-nucleotide
  modified_base (14)..(14): 2'-OMe-nucleotide
  modified_base (15)..(15): 2'-OMe-nucleotide
  modified_base (16)..(16): 2'-OMe-nucleotide
  modified_base (17)..(17): 2'-OMe-nucleotide
  modified_base (18)..(18): 2'-OMe-nucleotide
  modified_base (19)..(19): 2'-OMe-nucleotide
  modified_base (20)..(20): 2'-OMe-nucleotide
  modified_base (21)..(21): 2'-OMe-nucleotide
  modified_base (22)..(22): 2'-OMe-nucleotide
  modified_base (23)..(23): Locked nucleic acid (LNA) nucleotide
  modified_base (24)..(24): Locked nucleic acid (LNA) nucleotide
tttgccagaguuaucgaggcactt

SEQ ID NO: 1405 - DNA, 24 bp, Artificial Sequence
  source: /note="Description of Artificial Sequence: Synthetic oligonucleotide"
  source: /note="Description of Combined DNA/RNA Molecule: Synthetic oligonucleotide"
  modified_base (1)..(1): GalNAc-morpholino-thymidine analog 3
  modified_base (2)..(2): GalNAc-morpholino-thymidine analog 3
  modified_base (3)..(3): GalNAc-morpholino-thymidine analog 3
  modified_base (4)..(4): 2'-OMe-nucleotide
  modified_base (5)..(5): 2'-OMe-nucleotide
  modified_base (6)..(6): 2'-OMe-nucleotide
  modified_base (7)..(7): 2'-OMe-nucleotide
  modified_base (8)..(8): 2'-fluoro-nucleotide
  modified_base (9)..(9): 2'-OMe-nucleotide
  modified_base (10)..(10): 2'-fluoro-nucleotide
  modified_base (11)..(11): 2'-fluoro-nucleotide
  modified_base (12)..(12): 2'-fluoro-nucleotide
  modified_base (13)..(13): 2'-OMe-nucleotide
  modified_base (14)..(14): 2'-OMe-nucleotide
  modified_base (15)..(15): 2'-OMe-nucleotide
  modified_base (16)..(16): 2'-OMe-nucleotide
  modified_base (17)..(17): 2'-OMe-nucleotide
  modified_base (18)..(18): 2'-OMe-nucleotide
  modified_base (19)..(19): 2'-OMe-nucleotide
  modified_base (20)..(20): 2'-OMe-nucleotide
  modified_base (21)..(21): 2'-OMe-nucleotide
  modified_base (22)..(22): 2'-OMe-nucleotide
  modified_base (23)..(23): Locked nucleic acid (LNA) nucleotide
  modified_base (24)..(24): Locked nucleic acid (LNA) nucleotide
tttgccagaguuaucgaggcactt

SEQ ID NO: 1406 - DNA, 24 bp, Artificial Sequence
  source: /note="Description of Artificial Sequence: Synthetic oligonucleotide"
  source: /note="Description of Combined DNA/RNA Molecule: Synthetic oligonucleotide"
  modified_base (1)..(1): GalNAc-morpholino-thymidine analog 3
  modified_base (2)..(2): GalNAc-morpholino-thymidine analog 3
  modified_base (3)..(3): GalNAc-morpholino-thymidine analog 3
  modified_base (4)..(4): 2'-OMe-nucleotide
  modified_base (5)..(5): 2'-OMe-nucleotide
  modified_base (6)..(6): 2'-OMe-nucleotide
  modified_base (7)..(7): 2'-OMe-nucleotide
  modified_base (8)..(8): 2'-fluoro-nucleotide
  modified_base (9)..(9): 2'-OMe-nucleotide
  modified_base (10)..(10): 2'-fluoro-nucleotide
  modified_base (11)..(11): 2'-fluoro-nucleotide
  modified_base (12)..(12): 2'-fluoro-nucleotide
  modified_base (13)..(13): 2'-OMe-nucleotide
  modified_base (14)..(14): 2'-OMe-nucleotide
  modified_base (15)..(15): 2'-OMe-nucleotide
  modified_base (16)..(16): 2'-OMe-nucleotide
  modified_base (17)..(17): 2'-OMe-nucleotide
  modified_base (18)..(18): 2'-OMe-nucleotide
  modified_base (19)..(19): 2'-OMe-nucleotide
  modified_base (20)..(20): 2'-OMe-nucleotide
  modified_base (21)..(21): 2'-OMe-nucleotide
  modified_base (22)..(22): 2'-OMe-nucleotide
  modified_base (23)..(23): Locked nucleic acid (LNA) nucleotide
  modified_base (24)..(24): Locked nucleic acid (LNA) nucleotide
tttgccagaguuaucgaggcactt

SEQ ID NO: 1407 - DNA, 24 bp, Artificial Sequence
  source: /note="Description of Artificial Sequence: Synthetic oligonucleotide"
  source: /note="Description of Combined DNA/RNA Molecule: Synthetic oligonucleotide"
  modified_base (1)..(1): GalNAc-morpholino-thymidine analog 3
  modified_base (2)..(2): GalNAc-morpholino-thymidine analog 3
  modified_base (3)..(3): GalNAc-morpholino-thymidine analog 3
  modified_base (4)..(4): 2'-OMe-nucleotide
  modified_base (5)..(5): 2'-OMe-nucleotide
  modified_base (6)..(6): 2'-OMe-nucleotide
  modified_base (7)..(7): 2'-OMe-nucleotide
  modified_base (8)..(8): 2'-fluoro-nucleotide
  modified_base (9)..(9): 2'-OMe-nucleotide
  modified_base (10)..(10): 2'-fluoro-nucleotide
  modified_base (11)..(11): 2'-fluoro-nucleotide
  modified_base (12)..(12): 2'-fluoro-nucleotide
  modified_base (13)..(13): 2'-OMe-nucleotide
  modified_base (14)..(14): 2'-OMe-nucleotide
  modified_base (15)..(15): 2'-OMe-nucleotide
  modified_base (16)..(16): 2'-OMe-nucleotide
  modified_base (17)..(17): 2'-OMe-nucleotide
  modified_base (18)..(18): 2'-OMe-nucleotide
  modified_base (19)..(19): 2'-OMe-nucleotide
  modified_base (20)..(20): 2'-OMe-nucleotide
  modified_base (21)..(21): 2'-OMe-nucleotide
  modified_base (22)..(22): 2'-OMe-nucleotide
  modified_base (23)..(23): Locked nucleic acid (LNA) nucleotide
  modified_base (24)..(24): Locked nucleic acid (LNA) nucleotide
tttgccagaguuaucgaggcactt

SEQ ID NO: 1408 - DNA, 24 bp, Artificial Sequence
  source: /note="Description of Artificial Sequence: Synthetic oligonucleotide"
  source: /note="Description of Combined DNA/RNA Molecule: Synthetic oligonucleotide"
  modified_base (1)..(1): GalNAc-morpholino-thymidine analog 3
  modified_base (2)..(2): GalNAc-morpholino-thymidine analog 3
  modified_base (3)..(3): GalNAc-morpholino-thymidine analog 3
  modified_base (4)..(4): 2'-OMe-nucleotide
  modified_base (5)..(5): 2'-OMe-nucleotide
  modified_base (6)..(6): 2'-OMe-nucleotide
  modified_base (7)..(7): 2'-OMe-nucleotide
  modified_base (8)..(8): 2'-fluoro-nucleotide
  modified_base (9)..(9): 2'-OMe-nucleotide
  modified_base (10)..(10): 2'-fluoro-nucleotide
  modified_base (11)..(11): 2'-fluoro-nucleotide
  modified_base (12)..(12): 2'-fluoro-nucleotide
  modified_base (13)..(13): 2'-OMe-nucleotide
  modified_base (14)..(14): 2'-OMe-nucleotide
  modified_base (15)..(15): 2'-OMe-nucleotide
  modified_base (16)..(16): 2'-OMe-nucleotide
  modified_base (17)..(17): 2'-OMe-nucleotide
  modified_base (18)..(18): 2'-OMe-nucleotide
  modified_base (19)..(19): 2'-OMe-nucleotide
  modified_base (20)..(20): 2'-OMe-nucleotide
  modified_base (21)..(21): 2'-OMe-nucleotide
  modified_base (22)..(22): 2'-OMe-nucleotide
  modified_base (23)..(23): Locked nucleic acid (LNA) nucleotide
  modified_base (24)..(24): Locked nucleic acid (LNA) nucleotide
tttgccagaguuaucgaggcactt

SEQ ID NO: 1409 - DNA, 24 bp, Artificial Sequence
  source: /note="Description of Artificial Sequence: Synthetic oligonucleotide"
  source: /note="Description of Combined DNA/RNA Molecule: Synthetic oligonucleotide"
  modified_base (1)..(1): GalNAc-morpholino-thymidine analog 3
  modified_base (2)..(2): GalNAc-morpholino-thymidine analog 3
  modified_base (3)..(3): GalNAc-morpholino-thymidine analog 3
  modified_base (4)..(4): 2'-OMe-nucleotide
  modified_base (5)..(5): 2'-OMe-nucleotide
  modified_base (6)..(6): 2'-OMe-nucleotide
  modified_base (7)..(7): 2'-OMe-nucleotide
  modified_base (8)..(8): 2'-fluoro-nucleotide
  modified_base (9)..(9): 2'-OMe-nucleotide
  modified_base (10)..(10): 2'-fluoro-nucleotide
  modified_base (11)..(11): 2'-fluoro-nucleotide
  modified_base (12)..(12): 2'-fluoro-nucleotide
  modified_base (13)..(13): 2'-OMe-nucleotide
  modified_base (14)..(14): 2'-OMe-nucleotide
  modified_base (15)..(15): 2'-OMe-nucleotide
  modified_base (16)..(16): 2'-OMe-nucleotide
  modified_base (17)..(17): 2'-OMe-nucleotide
  modified_base (18)..(18): 2'-OMe-nucleotide
  modified_base (19)..(19): 2'-OMe-nucleotide
  modified_base (20)..(20): 2'-OMe-nucleotide
  modified_base (21)..(21): 2'-OMe-nucleotide
  modified_base (22)..(22): 2'-OMe-nucleotide
  modified_base (23)..(23): Locked nucleic acid (LNA) nucleotide
  modified_base (24)..(24): Locked nucleic acid (LNA) nucleotide
tttgccagaguuaucgaggcactt

SEQ ID NO: 1410 - DNA, 24 bp, Artificial Sequence
  source: /note="Description of Artificial Sequence: Synthetic oligonucleotide"
  source: /note="Description of Combined DNA/RNA Molecule: Synthetic oligonucleotide"
  modified_base (1)..(1): GalNAc-morpholino-thymidine analog 3
  misc_feature (1)..(2): /note="phosphorothioate bond"
  modified_base (2)..(2): GalNAc-morpholino-thymidine analog 3
  misc_feature (2)..(3): /note="phosphorothioate bond"
  modified_base (3)..(3): GalNAc-morpholino-thymidine analog 3
  modified_base (4)..(4): 2'-OMe-nucleotide
  modified_base (5)..(5): 2'-OMe-nucleotide
  modified_base (6)..(6): 2'-OMe-nucleotide
  modified_base (7)..(7): 2'-OMe-nucleotide
  modified_base (8)..(8): 2'-fluoro-nucleotide
  modified_base (9)..(9): 2'-OMe-nucleotide
  modified_base (10)..(10): 2'-fluoro-nucleotide
  modified_base (11)..(11): 2'-fluoro-nucleotide
  modified_base (12)..(12): 2'-fluoro-nucleotide
  modified_base (13)..(13): 2'-OMe-nucleotide
  modified_base (14)..(14): 2'-OMe-nucleotide
  modified_base (15)..(15): 2'-OMe-nucleotide
  modified_base (16)..(16): 2'-OMe-nucleotide
  modified_base (17)..(17): 2'-OMe-nucleotide
  modified_base (18)..(18): 2'-OMe-nucleotide
  modified_base (19)..(19): 2'-OMe-nucleotide
  modified_base (20)..(20): 2'-OMe-nucleotide
  modified_base (21)..(21): 2'-OMe-nucleotide
  modified_base (22)..(22): 2'-OMe-nucleotide
  misc_feature (22)..(23): /note="phosphorothioate bond"
  modified_base (23)..(23): Locked nucleic acid (LNA) nucleotide
  misc_feature (23)..(24): /note="phosphorothioate bond"
  modified_base (24)..(24): Locked nucleic acid (LNA) nucleotide
tttgccagaguuaucgaggcactt

SEQ ID NO: 1411 - DNA, 24 bp, Artificial Sequence
  source: /note="Description of Artificial Sequence: Synthetic oligonucleotide"
  source: /note="Description of Combined DNA/RNA Molecule: Synthetic oligonucleotide"
  modified_base (1)..(1): GalNAc-morpholino-thymidine analog 3
  misc_feature (1)..(2): /note="phosphorothioate bond"
  modified_base (2)..(2): GalNAc-morpholino-thymidine analog 3
  misc_feature (2)..(3): /note="phosphorothioate bond"
  modified_base (3)..(3): GalNAc-morpholino-thymidine analog 3
  modified_base (4)..(4): 2'-OMe-nucleotide
  modified_base (5)..(5): 2'-OMe-nucleotide
  modified_base (6)..(6): 2'-OMe-nucleotide
  modified_base (7)..(7): 2'-OMe-nucleotide
  modified_base (8)..(8): 2'-fluoro-nucleotide
  modified_base (9)..(9): 2'-OMe-nucleotide
  modified_base (10)..(10): 2'-fluoro-nucleotide
  modified_base (11)..(11): 2'-fluoro-nucleotide
  modified_base (12)..(12): 2'-fluoro-nucleotide
  modified_base (13)..(13): 2'-OMe-nucleotide
  modified_base (14)..(14): 2'-OMe-nucleotide
  modified_base (15)..(15): 2'-OMe-nucleotide
  modified_base (16)..(16): 2'-OMe-nucleotide
  modified_base (17)..(17): 2'-OMe-nucleotide
  modified_base (18)..(18): 2'-OMe-nucleotide
  modified_base (19)..(19): 2'-OMe-nucleotide
  modified_base (20)..(20): 2'-OMe-nucleotide
  modified_base (21)..(21): 2'-OMe-nucleotide
  modified_base (22)..(22): 2'-OMe-nucleotide
  misc_feature (22)..(23): /note="phosphorothioate bond"
  modified_base (23)..(23): Locked nucleic acid (LNA) nucleotide
  misc_feature (23)..(24): /note="phosphorothioate bond"
  modified_base (24)..(24): Locked nucleic acid (LNA) nucleotide
tttgccagaguuaucgaggcactt

SEQ ID NO: 1412 - DNA, 24 bp, Artificial Sequence
  source: /note="Description of Artificial Sequence: Synthetic oligonucleotide"
  source: /note="Description of Combined DNA/RNA Molecule: Synthetic oligonucleotide"
  modified_base (1)..(1): GalNAc-morpholino-thymidine analog 3
  misc_feature (1)..(2): /note="phosphorothioate bond"
  modified_base (2)..(2): GalNAc-morpholino-thymidine analog 3
  misc_feature (2)..(3): /note="phosphorothioate bond"
  modified_base (3)..(3): GalNAc-morpholino-thymidine analog 3
  modified_base (4)..(4): 2'-OMe-nucleotide
  modified_base (5)..(5): 2'-OMe-nucleotide
  modified_base (6)..(6): 2'-OMe-nucleotide
  modified_base (7)..(7): 2'-OMe-nucleotide
  modified_base (8)..(8): 2'-fluoro-nucleotide
  modified_base (9)..(9): 2'-OMe-nucleotide
  modified_base (10)..(10): 2'-fluoro-nucleotide
  modified_base (11)..(11): 2'-fluoro-nucleotide
  modified_base (12)..(12): 2'-fluoro-nucleotide
  modified_base (13)..(13): 2'-OMe-nucleotide
  modified_base (14)..(14): 2'-OMe-nucleotide
  modified_base (15)..(15): 2'-OMe-nucleotide
  modified_base (16)..(16): 2'-OMe-nucleotide
  modified_base (17)..(17): 2'-OMe-nucleotide
  modified_base (18)..(18): 2'-OMe-nucleotide
  modified_base (19)..(19): 2'-OMe-nucleotide
  modified_base (20)..(20): 2'-OMe-nucleotide
  modified_base (21)..(21): 2'-OMe-nucleotide
  modified_base (22)..(22): 2'-OMe-nucleotide
  misc_feature (22)..(23): /note="phosphorothioate bond"
  modified_base (23)..(23): Locked nucleic acid (LNA) nucleotide
  misc_feature (23)..(24): /note="phosphorothioate bond"
  modified_base (24)..(24): Locked nucleic acid (LNA) nucleotide
tttgccagaguuaucgaggcactt

SEQ ID NO: 1413 - DNA, 24 bp, Artificial Sequence
  source: /note="Description of Artificial Sequence: Synthetic oligonucleotide"
  source: /note="Description of Combined DNA/RNA Molecule: Synthetic oligonucleotide"
  modified_base (1)..(1): GalNAc-morpholino-thymidine analog 3
  misc_feature (1)..(2): /note="phosphorothioate bond"
  modified_base (2)..(2): GalNAc-morpholino-thymidine analog 3
  misc_feature (2)..(3): /note="phosphorothioate bond"
  modified_base (3)..(3): GalNAc-morpholino-thymidine analog 3
  modified_base (4)..(4): 2'-OMe-nucleotide
  modified_base (5)..(5): 2'-OMe-nucleotide
  modified_base (6)..(6): 2'-OMe-nucleotide
  modified_base (7)..(7): 2'-OMe-nucleotide
  modified_base (8)..(8): 2'-fluoro-nucleotide
  modified_base (9)..(9): 2'-OMe-nucleotide
  modified_base (10)..(10): 2'-fluoro-nucleotide
  modified_base (11)..(11): 2'-fluoro-nucleotide
  modified_base (12)..(12): 2'-fluoro-nucleotide
  modified_base (13)..(13): 2'-OMe-nucleotide
  modified_base (14)..(14): 2'-OMe-nucleotide
  modified_base (15)..(15): 2'-OMe-nucleotide
  modified_base (16)..(16): 2'-OMe-nucleotide
  modified_base (17)..(17): 2'-OMe-nucleotide
  modified_base (18)..(18): 2'-OMe-nucleotide
  modified_base (19)..(19): 2'-OMe-nucleotide
  modified_base (20)..(20): 2'-OMe-nucleotide
  modified_base (21)..(21): 2'-OMe-nucleotide
  modified_base (22)..(22): 2'-OMe-nucleotide
  misc_feature (22)..(23): /note="phosphorothioate bond"
  modified_base (23)..(23): Locked nucleic acid (LNA) nucleotide
  misc_feature (23)..(24): /note="phosphorothioate bond"
  modified_base (24)..(24): Locked nucleic acid (LNA) nucleotide
tttgccagaguuaucgaggcactt

SEQ ID NO: 1414 - DNA, 24 bp, Artificial Sequence
  source: /note="Description of Artificial Sequence: Synthetic oligonucleotide"
  source: /note="Description of Combined DNA/RNA Molecule: Synthetic oligonucleotide"
  modified_base (1)..(1): GalNAc-morpholino-thymidine analog 3
  misc_feature (1)..(2): /note="phosphorothioate bond"
  modified_base (2)..(2): GalNAc-morpholino-thymidine analog 3
  misc_feature (2)..(3): /note="phosphorothioate bond"
  modified_base (3)..(3): GalNAc-morpholino-thymidine analog 3
  modified_base (4)..(4): 2'-OMe-nucleotide
  modified_base (5)..(5): 2'-OMe-nucleotide
  modified_base (6)..(6): 2'-OMe-nucleotide
  modified_base (7)..(7): 2'-OMe-nucleotide
  modified_base (8)..(8): 2'-fluoro-nucleotide
  modified_base (9)..(9): 2'-OMe-nucleotide
  modified_base (10)..(10): 2'-fluoro-nucleotide
  modified_base (11)..(11): 2'-fluoro-nucleotide
  modified_base (12)..(12): 2'-fluoro-nucleotide
  modified_base (13)..(13): 2'-OMe-nucleotide
  modified_base (14)..(14): 2'-OMe-nucleotide
  modified_base (15)..(15): 2'-OMe-nucleotide
  modified_base (16)..(16): 2'-OMe-nucleotide
  modified_base (17)..(17): 2'-OMe-nucleotide
  modified_base (18)..(18): 2'-OMe-nucleotide
  modified_base (19)..(19): 2'-OMe-nucleotide
  modified_base (20)..(20): 2'-OMe-nucleotide
  modified_base (21)..(21): 2'-OMe-nucleotide
  modified_base (22)..(22): 2'-OMe-nucleotide
  misc_feature (22)..(23): /note="phosphorothioate bond"
  modified_base (23)..(23): Locked nucleic acid (LNA) nucleotide
  misc_feature (23)..(24): /note="phosphorothioate bond"
  modified_base (24)..(24): Locked nucleic acid (LNA) nucleotide
tttgccagaguuaucgaggcactt

SEQ ID NO: 1415 - DNA, 24 bp, Artificial Sequence
  source: /note="Description of Artificial Sequence: Synthetic oligonucleotide"
  source: /note="Description of Combined DNA/RNA Molecule: Synthetic oligonucleotide"
  modified_base (1)..(1): GalNAc-morpholino-thymidine analog 3
  misc_feature (1)..(2): /note="phosphorothioate bond"
  modified_base (2)..(2): GalNAc-morpholino-thymidine analog 3
  misc_feature (2)..(3): /note="phosphorothioate bond"
  modified_base (3)..(3): GalNAc-morpholino-thymidine analog 3
  modified_base (4)..(4): 2'-OMe-nucleotide
  modified_base (5)..(5): 2'-OMe-nucleotide
  modified_base (6)..(6): 2'-OMe-nucleotide
  modified_base (7)..(7): 2'-OMe-nucleotide
  modified_base (8)..(8): 2'-fluoro-nucleotide
  modified_base (9)..(9): 2'-OMe-nucleotide
  modified_base (10)..(10): 2'-fluoro-nucleotide
  modified_base (11)..(11): 2'-fluoro-nucleotide
  modified_base (12)..(12): 2'-fluoro-nucleotide
  modified_base (13)..(13): 2'-OMe-nucleotide
  modified_base (14)..(14): 2'-OMe-nucleotide
  modified_base (15)..(15): 2'-OMe-nucleotide
  modified_base (16)..(16): 2'-OMe-nucleotide
  modified_base (17)..(17): 2'-OMe-nucleotide
  modified_base (18)..(18): 2'-OMe-nucleotide
  modified_base (19)..(19): 2'-OMe-nucleotide
  modified_base (20)..(20): 2'-OMe-nucleotide
  modified_base (21)..(21): 2'-OMe-nucleotide
  modified_base (22)..(22): 2'-OMe-nucleotide
  misc_feature (22)..(23): /note="phosphorothioate bond"
  modified_base (23)..(23): Locked nucleic acid (LNA) nucleotide
  misc_feature (23)..(24): /note="phosphorothioate bond"
  modified_base (24)..(24): Locked nucleic acid (LNA) nucleotide
tttgccagaguuaucgaggcactt

SEQ ID NO: 1416 - DNA, 24 bp, Artificial Sequence
  source: /note="Description of Artificial Sequence: Synthetic oligonucleotide"
  source: /note="Description of Combined DNA/RNA Molecule: Synthetic oligonucleotide"
  modified_base (1)..(1): GalNAc-morpholino-thymidine analog 3
  misc_feature (1)..(2): /note="phosphorothioate bond"
  modified_base (2)..(2): GalNAc-morpholino-thymidine analog 3
  misc_feature (2)..(3): /note="phosphorothioate bond"
  modified_base (3)..(3): GalNAc-morpholino-thymidine analog 3
  modified_base (4)..(4): 2'-OMe-nucleotide
  modified_base (5)..(5): 2'-OMe-nucleotide
  modified_base (6)..(6): 2'-OMe-nucleotide
  modified_base (7)..(7): 2'-OMe-nucleotide
  modified_base (8)..(8): 2'-fluoro-nucleotide
  modified_base (9)..(9): 2'-OMe-nucleotide
  modified_base (10)..(10): 2'-fluoro-nucleotide
  modified_base (11)..(11): 2'-fluoro-nucleotide
  modified_base (12)..(12): 2'-fluoro-nucleotide
  modified_base (13)..(13): 2'-OMe-nucleotide
  modified_base (14)..(14): 2'-OMe-nucleotide
  modified_base (15)..(15): 2'-OMe-nucleotide
  modified_base (16)..(16): 2'-OMe-nucleotide
  modified_base (17)..(17): 2'-OMe-nucleotide
  modified_base (18)..(18): 2'-OMe-nucleotide
  modified_base (19)..(19): 2'-OMe-nucleotide
  modified_base (20)..(20): 2'-OMe-nucleotide
  modified_base (21)..(21): 2'-OMe-nucleotide
  modified_base (22)..(22): 2'-OMe-nucleotide
  misc_feature (22)..(23): /note="phosphorothioate bond"
  modified_base (23)..(23): Locked nucleic acid (LNA) nucleotide
  misc_feature (23)..(24): /note="phosphorothioate bond"
  modified_base (24)..(24): Locked nucleic acid (LNA) nucleotide
tttgccagaguuaucgaggcactt

SEQ ID NO: 1417 - DNA, 24 bp, Artificial Sequence
  source: /note="Description of Artificial Sequence: Synthetic oligonucleotide"
  source: /note="Description of Combined DNA/RNA Molecule: Synthetic oligonucleotide"
  modified_base (1)..(1): GalNAc-morpholino-thymidine analog 3
  misc_feature (1)..(2): /note="phosphorothioate bond"
  modified_base (2)..(2): GalNAc-morpholino-thymidine analog 3
  misc_feature (2)..(3): /note="phosphorothioate bond"
  modified_base (3)..(3): GalNAc-morpholino-thymidine analog 3
  modified_base (4)..(4): 2'-OMe-nucleotide
  modified_base (5)..(5): 2'-OMe-nucleotide
  modified_base (6)..(6): 2'-OMe-nucleotide
  modified_base (7)..(7): 2'-OMe-nucleotide
  modified_base (8)..(8): 2'-fluoro-nucleotide
  modified_base (9)..(9): 2'-OMe-nucleotide
  modified_base (10)..(10): 2'-fluoro-nucleotide
  modified_base (11)..(11): 2'-fluoro-nucleotide
  modified_base (12)..(12): 2'-fluoro-nucleotide
  modified_base (13)..(13): 2'-OMe-nucleotide
  modified_base (14)..(14): 2'-OMe-nucleotide
  modified_base (15)..(15): 2'-OMe-nucleotide
  modified_base (16)..(16): 2'-OMe-nucleotide
  modified_base (17)..(17): 2'-OMe-nucleotide
  modified_base (18)..(18): 2'-OMe-nucleotide
  modified_base (19)..(19): 2'-OMe-nucleotide
  modified_base (20)..(20): 2'-OMe-nucleotide
  modified_base (21)..(21): 2'-OMe-nucleotide
  modified_base (22)..(22): 2'-OMe-nucleotide
  misc_feature (22)..(23): /note="phosphorothioate bond"
  modified_base (23)..(23): Locked nucleic acid (LNA) nucleotide
  misc_feature (23)..(24): /note="phosphorothioate bond"
  modified_base (24)..(24): Locked nucleic acid (LNA) nucleotide
tttgccagaguuaucgaggcactt

SEQ ID NO: 1418 - DNA, 24 bp, Artificial Sequence
  source: /note="Description of Artificial Sequence: Synthetic oligonucleotide"
  source: /note="Description of Combined DNA/RNA Molecule: Synthetic oligonucleotide"
  modified_base (1)..(1): GalNAc-morpholino-thymidine analog 3
  misc_feature (1)..(2): /note="phosphorothioate bond"
  modified_base (2)..(2): GalNAc-morpholino-thymidine analog 3
  misc_feature (2)..(3): /note="phosphorothioate bond"
  modified_base (3)..(3): GalNAc-morpholino-thymidine analog 3
  modified_base (4)..(4): 2'-OMe-nucleotide
  modified_base (5)..(5): 2'-OMe-nucleotide
  modified_base (6)..(6): 2'-OMe-nucleotide
  modified_base (7)..(7): 2'-OMe-nucleotide
  modified_base (8)..(8): 2'-fluoro-nucleotide
  modified_base (9)..(9): 2'-OMe-nucleotide
  modified_base (10)..(10): 2'-fluoro-nucleotide
  modified_base (11)..(11): 2'-fluoro-nucleotide
  modified_base (12)..(12): 2'-fluoro-nucleotide
  modified_base (13)..(13): 2'-OMe-nucleotide
  modified_base (14)..(14): 2'-OMe-nucleotide
  modified_base (15)..(15): 2'-OMe-nucleotide
  modified_base (16)..(16): 2'-OMe-nucleotide
  modified_base (17)..(17): 2'-OMe-nucleotide
  modified_base (18)..(18): 2'-OMe-nucleotide
  modified_base (19)..(19): 2'-OMe-nucleotide
  modified_base (20)..(20): 2'-OMe-nucleotide
  modified_base (21)..(21): 2'-OMe-nucleotide
  modified_base (22)..(22): 2'-OMe-nucleotide
  misc_feature (22)..(23): /note="phosphorothioate bond"
  modified_base (23)..(23): Locked nucleic acid (LNA) nucleotide
  misc_feature (23)..(24): /note="phosphorothioate bond"
  modified_base (24)..(24): Locked nucleic acid (LNA) nucleotide
tttgccagaguuaucgaggcactt

SEQ ID NO: 1419 - DNA, 24 bp, Artificial Sequence
  source: /note="Description of Artificial Sequence: Synthetic oligonucleotide"
  source: /note="Description of Combined DNA/RNA Molecule: Synthetic oligonucleotide"
  modified_base (1)..(1): GalNAc-morpholino-thymidine analog 3
  modified_base (2)..(2): GalNAc-morpholino-thymidine analog 3
  modified_base (3)..(3): GalNAc-morpholino-thymidine analog 3
  modified_base (4)..(4): Locked nucleic acid (LNA) nucleotide
  modified_base (5)..(5): Locked nucleic acid (LNA) nucleotide
  modified_base (6)..(6): 2'-OMe-nucleotide
  modified_base (7)..(7): 2'-OMe-nucleotide
  modified_base (8)..(8): 2'-fluoro-nucleotide
  modified_base (9)..(9): 2'-OMe-nucleotide
  modified_base (10)..(10): 2'-fluoro-nucleotide
  modified_base (11)..(11): 2'-fluoro-nucleotide
  modified_base (12)..(12): 2'-fluoro-nucleotide
  modified_base (13)..(13): 2'-OMe-nucleotide
  modified_base (14)..(14): 2'-OMe-nucleotide
  modified_base (15)..(15): 2'-OMe-nucleotide
  modified_base (16)..(16): 2'-OMe-nucleotide
  modified_base (17)..(17): 2'-OMe-nucleotide
  modified_base (18)..(18): 2'-OMe-nucleotide
  modified_base (19)..(19): 2'-OMe-nucleotide
  modified_base (20)..(20): 2'-OMe-nucleotide
  modified_base (21)..(21): 2'-OMe-nucleotide
  modified_base (22)..(22): 2'-OMe-nucleotide
  modified_base (23)..(23): Locked nucleic acid (LNA) nucleotide
  modified_base (24)..(24): Locked nucleic acid (LNA) nucleotide
tttgccagaguuaucgaggcactt

SEQ ID NO: 1420 - DNA, 24 bp, Artificial Sequence
  source: /note="Description of Artificial Sequence: Synthetic oligonucleotide"
  source: /note="Description of Combined DNA/RNA Molecule: Synthetic oligonucleotide"
  modified_base (1)..(1): GalNAc-morpholino-thymidine analog 3
  modified_base (2)..(2): GalNAc-morpholino-thymidine analog 3
  modified_base (3)..(3): GalNAc-morpholino-thymidine analog 3
  modified_base (4)..(4): Locked nucleic acid (LNA) nucleotide
  modified_base (5)..(5): Locked nucleic acid (LNA) nucleotide
  modified_base (6)..(6): 2'-OMe-nucleotide
  modified_base (7)..(7): 2'-OMe-nucleotide
  modified_base (8)..(8): 2'-fluoro-nucleotide
  modified_base (9)..(9): 2'-OMe-nucleotide
  modified_base (10)..(10): 2'-fluoro-nucleotide
  modified_base (11)..(11): 2'-fluoro-nucleotide
  modified_base (12)..(12): 2'-fluoro-nucleotide
  modified_base (13)..(13): 2'-OMe-nucleotide
  modified_base (14)..(14): 2'-OMe-nucleotide
  modified_base (15)..(15): 2'-OMe-nucleotide
  modified_base (16)..(16): 2'-OMe-nucleotide
  modified_base (17)..(17): 2'-OMe-nucleotide
  modified_base (18)..(18): 2'-OMe-nucleotide
  modified_base (19)..(19): 2'-OMe-nucleotide
  modified_base (20)..(20): 2'-OMe-nucleotide
  modified_base (21)..(21): 2'-OMe-nucleotide
  modified_base (22)..(22): 2'-OMe-nucleotide
  modified_base (23)..(23): Locked nucleic acid (LNA) nucleotide
  modified_base (24)..(24): Locked nucleic acid (LNA) nucleotide
tttgccagaguuaucgaggcactt

SEQ ID NO: 1421 - DNA, 24 bp, Artificial Sequence
  source: /note="Description of Artificial Sequence: Synthetic oligonucleotide"
  source: /note="Description of Combined DNA/RNA Molecule: Synthetic oligonucleotide"
  modified_base (1)..(1): GalNAc-morpholino-thymidine analog 3
  modified_base (2)..(2): GalNAc-morpholino-thymidine analog 3
  modified_base (3)..(3): GalNAc-morpholino-thymidine analog 3
  modified_base (4)..(4): Locked nucleic acid (LNA) nucleotide
  modified_base (5)..(5): Locked nucleic acid (LNA) nucleotide
  modified_base (6)..(6): 2'-OMe-nucleotide
  modified_base (7)..(7): 2'-OMe-nucleotide
  modified_base (8)..(8): 2'-fluoro-nucleotide
  modified_base (9)..(9): 2'-OMe-nucleotide
  modified_base (10)..(10): 2'-fluoro-nucleotide
  modified_base (11)..(11): 2'-fluoro-nucleotide
  modified_base (12)..(12): 2'-fluoro-nucleotide
  modified_base (13)..(13): 2'-OMe-nucleotide
  modified_base (14)..(14): 2'-OMe-nucleotide
  modified_base (15)..(15): 2'-OMe-nucleotide
  modified_base (16)..(16): 2'-OMe-nucleotide
  modified_base (17)..(17): 2'-OMe-nucleotide
  modified_base (18)..(18): 2'-OMe-nucleotide
  modified_base (19)..(19): 2'-OMe-nucleotide
  modified_base (20)..(20): 2'-OMe-nucleotide
  modified_base (21)..(21): 2'-OMe-nucleotide
  modified_base (22)..(22): 2'-OMe-nucleotide
  modified_base (23)..(23): Locked nucleic acid (LNA) nucleotide
  modified_base (24)..(24): Locked nucleic acid (LNA) nucleotide
tttgccagaguuaucgaggcactt

SEQ ID NO: 1422 - DNA, 24 bp, Artificial Sequence
  source: /note="Description of Artificial Sequence: Synthetic oligonucleotide"
  source: /note="Description of Combined DNA/RNA Molecule: Synthetic oligonucleotide"
  modified_base (1)..(1): GalNAc-morpholino-thymidine analog 3
  modified_base (2)..(2): GalNAc-morpholino-thymidine analog 3
  modified_base (3)..(3): GalNAc-morpholino-thymidine analog 3
  modified_base (4)..(4): Locked nucleic acid (LNA) nucleotide
  modified_base (5)..(5): Locked nucleic acid (LNA) nucleotide
  modified_base (6)..(6): 2'-OMe-nucleotide
  modified_base (7)..(7): 2'-OMe-nucleotide
  modified_base (8)..(8): 2'-fluoro-nucleotide
  modified_base (9)..(9): 2'-OMe-nucleotide
  modified_base (10)..(10): 2'-fluoro-nucleotide
  modified_base (11)..(11): 2'-fluoro-nucleotide
  modified_base (12)..(12): 2'-fluoro-nucleotide
  modified_base (13)..(13): 2'-OMe-nucleotide
  modified_base (14)..(14): 2'-OMe-nucleotide
  modified_base (15)..(15): 2'-OMe-nucleotide
  modified_base (16)..(16): 2'-OMe-nucleotide
  modified_base (17)..(17): 2'-OMe-nucleotide
  modified_base (18)..(18): 2'-OMe-nucleotide
  modified_base (19)..(19): 2'-OMe-nucleotide
  modified_base (20)..(20): 2'-OMe-nucleotide
  modified_base (21)..(21): 2'-OMe-nucleotide
  modified_base (22)..(22): 2'-OMe-nucleotide
  modified_base (23)..(23): Locked nucleic acid (LNA) nucleotide
  modified_base (24)..(24): Locked nucleic acid (LNA) nucleotide
tttgccagaguuaucgaggcactt

SEQ ID NO: 1423 - DNA, 24 bp, Artificial Sequence
  source: /note="Description of Artificial Sequence: Synthetic oligonucleotide"
  source: /note="Description of Combined DNA/RNA Molecule: Synthetic oligonucleotide"
  modified_base (1)..(1): GalNAc-morpholino-thymidine analog 3
  modified_base (2)..(2): GalNAc-morpholino-thymidine analog 3
  modified_base (3)..(3): GalNAc-morpholino-thymidine analog 3
  modified_base (4)..(4): Locked nucleic acid (LNA) nucleotide
  modified_base (5)..(5): Locked nucleic acid (LNA) nucleotide
  modified_base (6)..(6): 2'-OMe-nucleotide
  modified_base (7)..(7): 2'-OMe-nucleotide
  modified_base (8)..(8): 2'-fluoro-nucleotide
  modified_base (9)..(9): 2'-OMe-nucleotide
  modified_base (10)..(10): 2'-fluoro-nucleotide
  modified_base (11)..(11): 2'-fluoro-nucleotide
  modified_base (12)..(12): 2'-fluoro-nucleotide
  modified_base (13)..(13): 2'-OMe-nucleotide
  modified_base (14)..(14): 2'-OMe-nucleotide
  modified_base (15)..(15): 2'-OMe-nucleotide
  modified_base (16)..(16): 2'-OMe-nucleotide
  modified_base (17)..(17): 2'-OMe-nucleotide
  modified_base (18)..(18): 2'-OMe-nucleotide
  modified_base (19)..(19): 2'-OMe-nucleotide
  modified_base (20)..(20): 2'-OMe-nucleotide
  modified_base (21)..(21): 2'-OMe-nucleotide
  modified_base (22)..(22): 2'-OMe-nucleotide
  modified_base (23)..(23): Locked nucleic acid (LNA) nucleotide
  modified_base (24)..(24): Locked nucleic acid (LNA) nucleotide
tttgccagaguuaucgaggcactt

SEQ ID NO: 1424 - DNA, 24 bp, Artificial Sequence
  source: /note="Description of Artificial Sequence: Synthetic oligonucleotide"
  source: /note="Description of Combined DNA/RNA Molecule: Synthetic oligonucleotide"
  modified_base (1)..(1): GalNAc-morpholino-thymidine analog 3
  misc_feature (1)..(2): /note="phosphorothioate bond"
  modified_base (2)..(2): GalNAc-morpholino-thymidine analog 3
  misc_feature (2)..(3): /note="phosphorothioate bond"
  modified_base (3)..(3): GalNAc-morpholino-thymidine analog 3
  modified_base (4)..(4): Locked nucleic acid (LNA) nucleotide
  modified_base (5)..(5): Locked nucleic acid (LNA) nucleotide
  modified_base (6)..(6): 2'-OMe-nucleotide
  modified_base (7)..(7): 2'-OMe-nucleotide
  modified_base (8)..(8): 2'-fluoro-nucleotide
  modified_base (9)..(9): 2'-OMe-nucleotide
  modified_base (10)..(10): 2'-fluoro-nucleotide
  modified_base (11)..(11): 2'-fluoro-nucleotide
  modified_base (12)..(12): 2'-fluoro-nucleotide
  modified_base (13)..(13): 2'-OMe-nucleotide
  modified_base (14)..(14): 2'-OMe-nucleotide
  modified_base (15)..(15): 2'-OMe-nucleotide
  modified_base (16)..(16): 2'-OMe-nucleotide
  modified_base (17)..(17): 2'-OMe-nucleotide
  modified_base (18)..(18): 2'-OMe-nucleotide
  modified_base (19)..(19): 2'-OMe-nucleotide
  modified_base (20)..(20): 2'-OMe-nucleotide
  modified_base (21)..(21): 2'-OMe-nucleotide
  modified_base (22)..(22): 2'-OMe-nucleotide
  misc_feature (22)..(23): /note="phosphorothioate bond"
  modified_base (23)..(23): Locked nucleic acid (LNA) nucleotide
  misc_feature (23)..(24): /note="phosphorothioate bond"
  modified_base (24)..(24): Locked nucleic acid (LNA) nucleotide
tttgccagaguuaucgaggcactt

SEQ ID NO: 1425 - DNA, 24 bp, Artificial Sequence
  source: /note="Description of Artificial Sequence: Synthetic oligonucleotide"
  source: /note="Description of Combined DNA/RNA Molecule: Synthetic oligonucleotide"
  modified_base (1)..(1): GalNAc-morpholino-thymidine analog 3
  misc_feature (1)..(2): /note="phosphorothioate bond"
  modified_base (2)..(2): GalNAc-morpholino-thymidine analog 3
  misc_feature (2)..(3): /note="phosphorothioate bond"
  modified_base (3)..(3): GalNAc-morpholino-thymidine analog 3
  modified_base (4)..(4): Locked nucleic acid (LNA) nucleotide
  modified_base (5)..(5): Locked nucleic acid (LNA) nucleotide
  modified_base (6)..(6): 2'-OMe-nucleotide
  modified_base (7)..(7): 2'-OMe-nucleotide
  modified_base (8)..(8): 2'-fluoro-nucleotide
  modified_base (9)..(9): 2'-OMe-nucleotide
  modified_base (10)..(10): 2'-fluoro-nucleotide
  modified_base (11)..(11): 2'-fluoro-nucleotide
  modified_base (12)..(12): 2'-fluoro-nucleotide
  modified_base (13)..(13): 2'-OMe-nucleotide
  modified_base (14)..(14): 2'-OMe-nucleotide
  modified_base (15)..(15): 2'-OMe-nucleotide
  modified_base (16)..(16): 2'-OMe-nucleotide
  modified_base (17)..(17): 2'-OMe-nucleotide
  modified_base (18)..(18): 2'-OMe-nucleotide
  modified_base (19)..(19): 2'-OMe-nucleotide
  modified_base (20)..(20): 2'-OMe-nucleotide
  modified_base (21)..(21): 2'-OMe-nucleotide
  modified_base (22)..(22): 2'-OMe-nucleotide
  misc_feature (22)..(23): /note="phosphorothioate bond"
  modified_base (23)..(23): Locked nucleic acid (LNA) nucleotide
  misc_feature (23)..(24): /note="phosphorothioate bond"
  modified_base (24)..(24): Locked nucleic acid (LNA) nucleotide
tttgccagaguuaucgaggcactt

SEQ ID NO: 1426 - DNA, 24 bp, Artificial Sequence
  source: /note="Description of Artificial Sequence: Synthetic oligonucleotide"
  source: /note="Description of Combined DNA/RNA Molecule: Synthetic oligonucleotide"
  modified_base (1)..(1): GalNAc-morpholino-thymidine analog 3
  misc_feature (1)..(2): /note="phosphorothioate bond"
  modified_base (2)..(2): GalNAc-morpholino-thymidine analog 3
  misc_feature (2)..(3): /note="phosphorothioate bond"
  modified_base (3)..(3): GalNAc-morpholino-thymidine analog 3
  modified_base (4)..(4): Locked nucleic acid (LNA) nucleotide
  modified_base (5)..(5): Locked nucleic acid (LNA) nucleotide
  modified_base (6)..(6): 2'-OMe-nucleotide
  modified_base (7)..(7): 2'-OMe-nucleotide
  modified_base (8)..(8): 2'-fluoro-nucleotide
  modified_base (9)..(9): 2'-OMe-nucleotide
  modified_base (10)..(10): 2'-fluoro-nucleotide
  modified_base (11)..(11): 2'-fluoro-nucleotide
  modified_base (12)..(12): 2'-fluoro-nucleotide
  modified_base (13)..(13): 2'-OMe-nucleotide
  modified_base (14)..(14): 2'-OMe-nucleotide
  modified_base (15)..(15): 2'-OMe-nucleotide
  modified_base (16)..(16): 2'-OMe-nucleotide
  modified_base (17)..(17): 2'-OMe-nucleotide
  modified_base (18)..(18): 2'-OMe-nucleotide
  modified_base (19)..(19): 2'-OMe-nucleotide
  modified_base (20)..(20): 2'-OMe-nucleotide
  modified_base (21)..(21): 2'-OMe-nucleotide
  modified_base (22)..(22): 2'-OMe-nucleotide
  misc_feature (22)..(23): /note="phosphorothioate bond"
  modified_base (23)..(23): Locked nucleic acid (LNA) nucleotide
  misc_feature (23)..(24): /note="phosphorothioate bond"
  modified_base (24)..(24): Locked nucleic acid (LNA) nucleotide
tttgccagaguuaucgaggcactt

SEQ ID NO: 1427 - DNA, 24 bp, Artificial Sequence
  source: /note="Description of Artificial Sequence: Synthetic oligonucleotide"
  source: /note="Description of Combined DNA/RNA Molecule: Synthetic oligonucleotide"
  modified_base (1)..(1): GalNAc-morpholino-thymidine analog 3
  misc_feature (1)..(2): /note="phosphorothioate bond"
  modified_base (2)..(2): GalNAc-morpholino-thymidine analog 3
  misc_feature (2)..(3): /note="phosphorothioate bond"
  modified_base (3)..(3): GalNAc-morpholino-thymidine analog 3
  modified_base (4)..(4): Locked nucleic acid (LNA) nucleotide
  modified_base (5)..(5): Locked nucleic acid (LNA) nucleotide
  modified_base (6)..(6): 2'-OMe-nucleotide
  modified_base (7)..(7): 2'-OMe-nucleotide
  modified_base (8)..(8): 2'-fluoro-nucleotide
  modified_base (9)..(9): 2'-OMe-nucleotide
  modified_base (10)..(10): 2'-fluoro-nucleotide
  modified_base (11)..(11): 2'-fluoro-nucleotide
  modified_base (12)..(12): 2'-fluoro-nucleotide
  modified_base (13)..(13): 2'-OMe-nucleotide
  modified_base (14)..(14): 2'-OMe-nucleotide
  modified_base (15)..(15): 2'-OMe-nucleotide
  modified_base (16)..(16): 2'-OMe-nucleotide
  modified_base (17)..(17): 2'-OMe-nucleotide
  modified_base (18)..(18): 2'-OMe-nucleotide
  modified_base (19)..(19): 2'-OMe-nucleotide
  modified_base (20)..(20): 2'-OMe-nucleotide
  modified_base (21)..(21): 2'-OMe-nucleotide
  modified_base (22)..(22): 2'-OMe-nucleotide
  misc_feature (22)..(23): /note="phosphorothioate bond"
  modified_base (23)..(23): Locked nucleic acid (LNA) nucleotide
  misc_feature (23)..(24): /note="phosphorothioate bond"
  modified_base (24)..(24): Locked nucleic acid (LNA) nucleotide
tttgccagaguuaucgaggcactt

SEQ ID NO: 1428 - DNA, 24 bp, Artificial Sequence
  source: /note="Description of Artificial Sequence: Synthetic oligonucleotide"
  source: /note="Description of Combined DNA/RNA Molecule: Synthetic oligonucleotide"
  modified_base (1)..(1): GalNAc-morpholino-thymidine analog 3
  misc_feature (1)..(2): /note="phosphorothioate bond"
  modified_base (2)..(2): GalNAc-morpholino-thymidine analog 3
  misc_feature (2)..(3): /note="phosphorothioate bond"
  modified_base (3)..(3): GalNAc-morpholino-thymidine analog 3
  modified_base (4)..(4): Locked nucleic acid (LNA) nucleotide
  modified_base (5)..(5): Locked nucleic acid (LNA) nucleotide
  modified_base (6)..(6): 2'-OMe-nucleotide
  modified_base (7)..(7): 2'-OMe-nucleotide
  modified_base (8)..(8): 2'-fluoro-nucleotide
  modified_base (9)..(9): 2'-OMe-nucleotide
  modified_base (10)..(10): 2'-fluoro-nucleotide
  modified_base (11)..(11): 2'-fluoro-nucleotide
  modified_base (12)..(12): 2'-fluoro-nucleotide
  modified_base (13)..(13): 2'-OMe-nucleotide
  modified_base (14)..(14): 2'-OMe-nucleotide
  modified_base (15)..(15): 2'-OMe-nucleotide
  modified_base (16)..(16): 2'-OMe-nucleotide
  modified_base (17)..(17): 2'-OMe-nucleotide
  modified_base (18)..(18): 2'-OMe-nucleotide
  modified_base (19)..(19): 2'-OMe-nucleotide
  modified_base (20)..(20): 2'-OMe-nucleotide
  modified_base (21)..(21): 2'-OMe-nucleotide
  modified_base (22)..(22): 2'-OMe-nucleotide
  misc_feature (22)..(23): /note="phosphorothioate bond"
  modified_base (23)..(23): Locked nucleic acid (LNA) nucleotide
  misc_feature (23)..(24): /note="phosphorothioate bond"
  modified_base (24)..(24): Locked nucleic acid (LNA) nucleotide
tttgccagaguuaucgaggcactt

SEQ ID NO: 1429 - RNA, 21 nt, Artificial Sequence
  source: /note="Description of Artificial Sequence: Synthetic oligonucleotide"
  modified_base (1)..(1): 2'-OMe-nucleotide
  misc_feature (1)..(2): /note="phosphorothioate bond"
  modified_base (2)..(2): 2'-fluoro-nucleotide
  misc_feature (2)..(3): /note="phosphorothioate bond"
  modified_base (3)..(3): 2'-OMe-nucleotide
  modified_base (4)..(4): 2'-fluoro-nucleotide
  modified_base (5)..(5): 2'-OMe-nucleotide
  modified_base (6)..(6): 2'-OMe-nucleotide
  modified_base (7)..(7): 2'-OMe-nucleotide
  modified_base (8)..(8): 2'-OMe-nucleotide
  modified_base (9)..(9): 2'-OMe-nucleotide
  modified_base (10)..(10): 2'-OMe-nucleotide
  modified_base (11)..(11): 2'-OMe-nucleotide
  modified_base (12)..(12): 2'-OMe-nucleotide
  modified_base (13)..(13): 2'-OMe-nucleotide
  modified_base (14)..(14): 2'-fluoro-nucleotide
  modified_base (15)..(15): 2'-OMe-nucleotide
  modified_base (16)..(16): 2'-fluoro-nucleotide
  modified_base (17)..(17): 2'-OMe-nucleotide
  modified_base (18)..(18): 2'-OMe-nucleotide
  modified_base (19)..(19): 2'-OMe-nucleotide
  misc_feature (19)..(20): /note="phosphorothioate bond"
  modified_base (20)..(20): 2'-OMe-nucleotide
  misc_feature (20)..(21): /note="phosphorothioate bond"
  modified_base (21)..(21): 2'-OMe-nucleotide
guaugugccuugauaacucaa

SEQ ID NO: 1430 - RNA, 21 nt, Artificial Sequence
  source: /note="Description of Artificial Sequence: Synthetic oligonucleotide"
  modified_base (1)..(1): 2'-OMe-nucleotide
  misc_feature (1)..(2): /note="phosphorothioate bond"
  modified_base (2)..(2): 2'-fluoro-nucleotide
  misc_feature (2)..(3): /note="phosphorothioate bond"
  modified_base (3)..(3): 2'-OMe-nucleotide
  modified_base (4)..(4): 2'-OMe-nucleotide
  modified_base (5)..(5): 2'-OMe-nucleotide
  modified_base (6)..(6): 2'-fluoro-nucleotide
  modified_base (7)..(7): 2'-OMe-nucleotide
  modified_base (8)..(8): 2'-OMe-nucleotide
  modified_base (9)..(9): 2'-OMe-nucleotide
  modified_base (10)..(10): 2'-OMe-nucleotide
  modified_base (11)..(11): 2'-OMe-nucleotide
  modified_base (12)..(12): 2'-OMe-nucleotide
  modified_base (13)..(13): 2'-OMe-nucleotide
  modified_base (14)..(14): 2'-fluoro-nucleotide
  modified_base (15)..(15): 2'-OMe-nucleotide
  modified_base (16)..(16): 2'-fluoro-nucleotide
  modified_base (17)..(17): 2'-OMe-nucleotide
  modified_base (18)..(18): 2'-OMe-nucleotide
  modified_base (19)..(19): 2'-OMe-nucleotide
  misc_feature (19)..(20): /note="phosphorothioate bond"
  modified_base (20)..(20): 2'-OMe-nucleotide
  misc_feature (20)..(21): /note="phosphorothioate bond"
  modified_base (21)..(21): 2'-OMe-nucleotide
guaugugccuugauaacucaa

SEQ ID NO: 1431 - RNA, 21 nt, Artificial Sequence
  source: /note="Description of Artificial Sequence: Synthetic oligonucleotide"
  modified_base (1)..(1): 2'-OMe-nucleotide
  misc_feature (1)..(2): /note="phosphorothioate bond"
  modified_base (2)..(2): 2'-fluoro-nucleotide
  misc_feature (2)..(3): /note="phosphorothioate bond"
  modified_base (3)..(3): 2'-OMe-nucleotide
  modified_base (4)..(4): 2'-fluoro-nucleotide
  modified_base (5)..(5): 2'-OMe-nucleotide
  modified_base (6)..(6): 2'-OMe-nucleotide
  modified_base (7)..(7): 2'-OMe-nucleotide
  modified_base (8)..(8): 2'-fluoro-nucleotide
  modified_base (9)..(9): 2'-fluoro-nucleotide
  modified_base (10)..(10): 2'-OMe-nucleotide
  modified_base (11)..(11): 2'-OMe-nucleotide
  modified_base (12)..(12): 2'-OMe-nucleotide
  modified_base (13)..(13): 2'-OMe-nucleotide
  modified_base (14)..(14): 2'-fluoro-nucleotide
  modified_base (15)..(15): 2'-OMe-nucleotide
  modified_base (16)..(16): 2'-fluoro-nucleotide
  modified_base (17)..(17): 2'-OMe-nucleotide
  modified_base (18)..(18): 2'-OMe-nucleotide
  modified_base (19)..(19): 2'-OMe-nucleotide
  misc_feature (19)..(20): /note="phosphorothioate bond"
  modified_base (20)..(20): 2'-OMe-nucleotide
  misc_feature (20)..(21): /note="phosphorothioate bond"
  modified_base (21)..(21): 2'-OMe-nucleotide
guaugugccuugauaacucaa

SEQ ID NO: 1432 - RNA, 21 nt, Artificial Sequence
  source: /note="Description of Artificial Sequence: Synthetic oligonucleotide"
  modified_base (1)..(1): 2'-OMe-nucleotide
  misc_feature (1)..(2): /note="phosphorothioate bond"
  modified_base (2)..(2): 2'-fluoro-nucleotide
  misc_feature (2)..(3): /note="phosphorothioate bond"
  modified_base (3)..(3): 2'-OMe-nucleotide
  modified_base (4)..(4): 2'-fluoro-nucleotide
  modified_base (5)..(5): 2'-OMe-nucleotide
  modified_base (6)..(6): 2'-OMe-nucleotide
  modified_base (7)..(7): 2'-OMe-nucleotide
  modified_base (8)..(8): 2'-OMe-nucleotide
  modified_base (9)..(9): 2'-fluoro-nucleotide
  modified_base (10)..(10): 2'-OMe-nucleotide
  modified_base (11)..(11): 2'-OMe-nucleotide
  modified_base (12)..(12): 2'-OMe-nucleotide
  modified_base (13)..(13): 2'-OMe-nucleotide
  modified_base (14)..(14): 2'-fluoro-nucleotide
  modified_base (15)..(15): 2'-OMe-nucleotide
  modified_base (16)..(16): 2'-fluoro-nucleotide
  modified_base (17)..(17): 2'-OMe-nucleotide
  modified_base (18)..(18): 2'-OMe-nucleotide
  modified_base (19)..(19): 2'-OMe-nucleotide
  misc_feature (19)..(20): /note="phosphorothioate bond"
  modified_base (20)..(20): 2'-OMe-nucleotide
  misc_feature (20)..(21): /note="phosphorothioate bond"
  modified_base (21)..(21): 2'-OMe-nucleotide
guaugugccuugauaacucaa

SEQ ID NO: 1433 - DNA, 21 bp, Artificial Sequence
  source: /note="Description of Artificial Sequence: Synthetic oligonucleotide"
  source: /note="Description of Combined DNA/RNA Molecule: Synthetic oligonucleotide"
  modified_base (1)..(1): 2'-fluoro-nucleotide
  misc_feature (1)..(2): /note="phosphorothioate bond"
  modified_base (2)..(2): 2'-fluoro-nucleotide
  misc_feature (2)..(3): /note="phosphorothioate bond"
  modified_base (3)..(3): 2'-OMe-nucleotide
  modified_base (4)..(4): 2'-fluoro-nucleotide
  modified_base (5)..(5): 2'-OMe-nucleotide
  modified_base (6)..(6): 2'-fluoro-nucleotide
  modified_base (7)..(7): 2'-OMe-nucleotide
  modified_base (8)..(8): 2'-fluoro-nucleotide
  modified_base (9)..(9): 2'-OMe-nucleotide
  modified_base (10)..(10): 2'-fluoro-nucleotide
  modified_base (11)..(11): 2'-OMe-nucleotide
  modified_base (12)..(12): 2'-OMe-nucleotide
  modified_base (13)..(13): 2'-OMe-nucleotide
  modified_base (14)..(14): 2'-fluoro-nucleotide
  modified_base (15)..(15): 2'-OMe-nucleotide
  modified_base (16)..(16): 2'-fluoro-nucleotide
  modified_base (17)..(17): 2'-OMe-nucleotide
  modified_base (18)..(18): 2'-fluoro-nucleotide
  modified_base (19)..(19): 2'-OMe-nucleotide
  misc_feature (19)..(20): /note="phosphorothioate bond"
  modified_base (20)..(20): dT
  misc_feature (20)..(21): /note="phosphorothioate bond"
  modified_base (21)..(21): dT
guaugugccuugauaacuctt

SEQ ID NO: 1434 - RNA, 21 nt, Artificial Sequence
  source: /note="Description of Artificial Sequence: Synthetic oligonucleotide"
  modified_base (1)..(1): 2'-OMe-nucleotide
  misc_feature (1)..(2): /note="phosphorothioate bond"
  modified_base (2)..(2): 2'-fluoro-nucleotide
  misc_feature (2)..(3): /note="phosphorothioate bond"
  modified_base (3)..(3): 2'-OMe-nucleotide
  modified_base (4)..(4): 2'-fluoro-nucleotide
  modified_base (5)..(5): 2'-OMe-nucleotide
  modified_base (6)..(6): 2'-OMe-nucleotide
  modified_base (7)..(7): 2'-OMe-nucleotide
  modified_base (8)..(8): 2'-OMe-nucleotide
  modified_base (9)..(9): 2'-OMe-nucleotide
  modified_base (10)..(10): 2'-OMe-nucleotide
  modified_base (11)..(11): 2'-OMe-nucleotide
  modified_base (12)..(12): 2'-OMe-nucleotide
  modified_base (13)..(13): 2'-OMe-nucleotide
  modified_base (14)..(14): 2'-fluoro-nucleotide
  modified_base (15)..(15): 2'-OMe-nucleotide
  modified_base (16)..(16): 2'-fluoro-nucleotide
  modified_base (17)..(17): 2'-OMe-nucleotide
  modified_base (18)..(18): 2'-OMe-nucleotide
  modified_base (19)..(19): 2'-OMe-nucleotide
  misc_feature (19)..(20): /note="phosphorothioate bond"
  modified_base (20)..(20): 2'-OMe-nucleotide
  misc_feature (20)..(21): /note="phosphorothioate bond"
  modified_base (21)..(21): 2'-OMe-nucleotide
guaugugccuugauaacucaa

SEQ ID NO: 1435 - RNA, 21 nt, Artificial Sequence
  source: /note="Description of Artificial Sequence: Synthetic oligonucleotide"
  modified_base (1)..(1): 2'-OMe-nucleotide
  misc_feature (1)..(2): /note="phosphorothioate bond"
  modified_base (2)..(2): 2'-fluoro-nucleotide
  misc_feature (2)..(3): /note="phosphorothioate bond"
  modified_base (3)..(3): 2'-OMe-nucleotide
  modified_base (4)..(4): 2'-OMe-nucleotide
  modified_base (5)..(5): 2'-OMe-nucleotide
  modified_base (6)..(6): 2'-fluoro-nucleotide
  modified_base (7)..(7): 2'-OMe-nucleotide
  modified_base (8)..(8): 2'-OMe-nucleotide
  modified_base (9)..(9): 2'-OMe-nucleotide
  modified_base (10)..(10): 2'-OMe-nucleotide
  modified_base (11)..(11): 2'-OMe-nucleotide
  modified_base (12)..(12): 2'-OMe-nucleotide
  modified_base (13)..(13): 2'-OMe-nucleotide
  modified_base (14)..(14): 2'-fluoro-nucleotide
  modified_base (15)..(15): 2'-OMe-nucleotide
  modified_base (16)..(16): 2'-fluoro-nucleotide
  modified_base (17)..(17): 2'-OMe-nucleotide
  modified_base (18)..(18): 2'-OMe-nucleotide
  modified_base (19)..(19): 2'-OMe-nucleotide
  misc_feature (19)..(20): /note="phosphorothioate bond"
  modified_base (20)..(20): 2'-OMe-nucleotide
  misc_feature (20)..(21): /note="phosphorothioate bond"
  modified_base (21)..(21): 2'-OMe-nucleotide
guaugugccuugauaacucaa

SEQ ID NO: 1436 - RNA, 21 nt, Artificial Sequence
  source: /note="Description of Artificial Sequence: Synthetic oligonucleotide"
  modified_base (1)..(1): 2'-OMe-nucleotide
  misc_feature (1)..(2): /note="phosphorothioate bond"
  modified_base (2)..(2): 2'-fluoro-nucleotide
  misc_feature (2)..(3): /note="phosphorothioate bond"
  modified_base (3)..(3): 2'-OMe-nucleotide
  modified_base (4)..(4): 2'-fluoro-nucleotide
  modified_base (5)..(5): 2'-OMe-nucleotide
  modified_base (6)..(6): 2'-OMe-nucleotide
  modified_base (7)..(7): 2'-OMe-nucleotide
  modified_base (8)..(8): 2'-fluoro-nucleotide
  modified_base (9)..(9): 2'-fluoro-nucleotide
  modified_base (10)..(10): 2'-OMe-nucleotide
  modified_base (11)..(11): 2'-OMe-nucleotide
  modified_base (12)..(12): 2'-OMe-nucleotide
  modified_base (13)..(13): 2'-OMe-nucleotide
  modified_base (14)..(14): 2'-fluoro-nucleotide
  modified_base (15)..(15): 2'-OMe-nucleotide
  modified_base (16)..(16): 2'-fluoro-nucleotide
  modified_base (17)..(17): 2'-OMe-nucleotide
  modified_base (18)..(18): 2'-OMe-nucleotide
  modified_base (19)..(19): 2'-OMe-nucleotide
  misc_feature (19)..(20): /note="phosphorothioate bond"
  modified_base (20)..(20): 2'-OMe-nucleotide
  misc_feature (20)..(21): /note="phosphorothioate bond"
  modified_base (21)..(21): 2'-OMe-nucleotide
guaugugccuugauaacucaa

SEQ ID NO: 1437 - RNA, 21 nt, Artificial Sequence
  source: /note="Description of Artificial Sequence: Synthetic oligonucleotide"
  modified_base (1)..(1): 2'-OMe-nucleotide
  misc_feature (1)..(2): /note="phosphorothioate bond"
  modified_base (2)..(2): 2'-fluoro-nucleotide
  misc_feature (2)..(3): /note="phosphorothioate bond"
  modified_base (3)..(3): 2'-OMe-nucleotide
  modified_base (4)..(4): 2'-fluoro-nucleotide
  modified_base (5)..(5): 2'-OMe-nucleotide
  modified_base (6)..(6): 2'-OMe-nucleotide
  modified_base (7)..(7): 2'-OMe-nucleotide
  modified_base (8)..(8): 2'-OMe-nucleotide
  modified_base (9)..(9): 2'-fluoro-nucleotide
  modified_base (10)..(10): 2'-OMe-nucleotide
  modified_base (11)..(11): 2'-OMe-nucleotide
  modified_base (12)..(12): 2'-OMe-nucleotide
  modified_base (13)..(13): 2'-OMe-nucleotide
  modified_base (14)..(14): 2'-fluoro-nucleotide
  modified_base (15)..(15): 2'-OMe-nucleotide
  modified_base (16)..(16): 2'-fluoro-nucleotide
  modified_base (17)..(17): 2'-OMe-nucleotide
  modified_base (18)..(18): 2'-OMe-nucleotide
  modified_base (19)..(19): 2'-OMe-nucleotide
  misc_feature (19)..(20): /note="phosphorothioate bond"
  modified_base (20)..(20): 2'-OMe-nucleotide
  misc_feature (20)..(21): /note="phosphorothioate bond"
  modified_base (21)..(21): 2'-OMe-nucleotide
guaugugccuugauaacucaa

SEQ ID NO: 1438 - DNA, 21 bp, Artificial Sequence
  source: /note="Description of Artificial Sequence: Synthetic oligonucleotide"
  source: /note="Description of Combined DNA/RNA Molecule: Synthetic oligonucleotide"
  modified_base (1)..(1): 2'-fluoro-nucleotide
  misc_feature (1)..(2): /note="phosphorothioate bond"
  modified_base (2)..(2): 2'-fluoro-nucleotide
  misc_feature (2)..(3): /note="phosphorothioate bond"
  modified_base (3)..(3): 2'-OMe-nucleotide
  modified_base (4)..(4): 2'-fluoro-nucleotide
  modified_base (5)..(5): 2'-OMe-nucleotide
  modified_base (6)..(6): 2'-fluoro-nucleotide
  modified_base (7)..(7): 2'-OMe-nucleotide
  modified_base (8)..(8): 2'-fluoro-nucleotide
  modified_base (9)..(9): 2'-OMe-nucleotide
  modified_base (10)..(10): 2'-fluoro-nucleotide
  modified_base (11)..(11): 2'-OMe-nucleotide
  modified_base (12)..(12): 2'-OMe-nucleotide
  modified_base (13)..(13): 2'-OMe-nucleotide
  modified_base (14)..(14): 2'-fluoro-nucleotide
  modified_base (15)..(15): 2'-OMe-nucleotide
  modified_base (16)..(16): 2'-fluoro-nucleotide
  modified_base (17)..(17): 2'-OMe-nucleotide
  modified_base (18)..(18): 2'-fluoro-nucleotide
  modified_base (19)..(19): 2'-OMe-nucleotide
  misc_feature (19)..(20): /note="phosphorothioate bond"
  modified_base (20)..(20): dT
  misc_feature (20)..(21): /note="phosphorothioate bond"
  modified_base (21)..(21): dT
guaugugccuugauaacuctt

SEQ ID NO: 1439 - RNA, 21 nt, Artificial Sequence
  source: /note="Description of Artificial Sequence: Synthetic oligonucleotide"
  modified_base (1)..(1): 2'-OMe-nucleotide
  misc_feature (1)..(2): /note="phosphorothioate bond"
  modified_base (2)..(2): 2'-fluoro-nucleotide
  misc_feature (2)..(3): /note="phosphorothioate bond"
  modified_base (3)..(3): 2'-OMe-nucleotide
  modified_base (4)..(4): 2'-fluoro-nucleotide
  modified_base (5)..(5): 2'-OMe-nucleotide
  modified_base (6)..(6): 2'-OMe-nucleotide
  modified_base (7)..(7): 2'-OMe-nucleotide
  modified_base (8)..(8): 2'-OMe-nucleotide
  modified_base (9)..(9): 2'-OMe-nucleotide
  modified_base (10)..(10): 2'-OMe-nucleotide
  modified_base (11)..(11): 2'-OMe-nucleotide
  modified_base (12)..(12): 2'-OMe-nucleotide
  modified_base (13)..(13): 2'-OMe-nucleotide
  modified_base (14)..(14): 2'-fluoro-nucleotide
  modified_base (15)..(15): 2'-OMe-nucleotide
  modified_base (16)..(16): 2'-fluoro-nucleotide
  modified_base (17)..(17): 2'-OMe-nucleotide
  modified_base (18)..(18): 2'-OMe-nucleotide
  modified_base (19)..(19): 2'-OMe-nucleotide
  misc_feature (19)..(20): /note="phosphorothioate bond"
  modified_base (20)..(20): 2'-OMe-nucleotide
  misc_feature (20)..(21): /note="phosphorothioate bond"
  modified_base (21)..(21): 2'-OMe-nucleotide
guaugugccuugauaacucaa

SEQ ID NO: 1440 - RNA, 21 nt, Artificial Sequence
  source: /note="Description of Artificial Sequence: Synthetic oligonucleotide"
  modified_base (1)..(1): 2'-OMe-nucleotide
  misc_feature (1)..(2): /note="phosphorothioate bond"
  modified_base (2)..(2): 2'-fluoro-nucleotide
  misc_feature (2)..(3): /note="phosphorothioate bond"
  modified_base (3)..(3): 2'-OMe-nucleotide
  modified_base (4)..(4): 2'-OMe-nucleotide
  modified_base (5)..(5): 2'-OMe-nucleotide
  modified_base (6)..(6): 2'-fluoro-nucleotide
  modified_base (7)..(7): 2'-OMe-nucleotide
  modified_base (8)..(8): 2'-OMe-nucleotide
  modified_base (9)..(9): 2'-OMe-nucleotide
  modified_base (10)..(10): 2'-OMe-nucleotide
  modified_base (11)..(11): 2'-OMe-nucleotide
  modified_base (12)..(12): 2'-OMe-nucleotide
  modified_base (13)..(13): 2'-OMe-nucleotide
  modified_base (14)..(14): 2'-fluoro-nucleotide
  modified_base (15)..(15): 2'-OMe-nucleotide
  modified_base (16)..(16): 2'-fluoro-nucleotide
  modified_base (17)..(17): 2'-OMe-nucleotide
  modified_base (18)..(18): 2'-OMe-nucleotide
  modified_base (19)..(19): 2'-OMe-nucleotide
  misc_feature (19)..(20): /note="phosphorothioate bond"
  modified_base (20)..(20): 2'-OMe-nucleotide
  misc_feature (20)..(21): /note="phosphorothioate bond"
  modified_base (21)..(21): 2'-OMe-nucleotide
guaugugccuugauaacucaa

SEQ ID NO: 1441 - RNA, 21 nt, Artificial Sequence
  source: /note="Description of Artificial Sequence: Synthetic oligonucleotide"
  modified_base (1)..(1): 2'-OMe-nucleotide
  misc_feature (1)..(2): /note="phosphorothioate bond"
  modified_base (2)..(2): 2'-fluoro-nucleotide
  misc_feature (2)..(3): /note="phosphorothioate bond"
  modified_base (3)..(3): 2'-OMe-nucleotide
  modified_base (4)..(4): 2'-fluoro-nucleotide
  modified_base (5)..(5): 2'-OMe-nucleotide
  modified_base (6)..(6): 2'-OMe-nucleotide
  modified_base (7)..(7): 2'-OMe-nucleotide
  modified_base (8)..(8): 2'-fluoro-nucleotide
  modified_base (9)..(9): 2'-fluoro-nucleotide
  modified_base (10)..(10): 2'-OMe-nucleotide
  modified_base (11)..(11): 2'-OMe-nucleotide
  modified_base (12)..(12): 2'-OMe-nucleotide
  modified_base (13)..(13): 2'-OMe-nucleotide
  modified_base (14)..(14): 2'-fluoro-nucleotide
  modified_base (15)..(15): 2'-OMe-nucleotide
  modified_base (16)..(16): 2'-fluoro-nucleotide
  modified_base (17)..(17): 2'-OMe-nucleotide
  modified_base (18)..(18): 2'-OMe-nucleotide
  modified_base (19)..(19): 2'-OMe-nucleotide
  misc_feature (19)..(20): /note="phosphorothioate bond"
  modified_base (20)..(20): 2'-OMe-nucleotide
  misc_feature (20)..(21): /note="phosphorothioate bond"
  modified_base (21)..(21): 2'-OMe-nucleotide
guaugugccuugauaacucaa

SEQ ID NO: 1442 - RNA, 21 nt, Artificial Sequence
  source: /note="Description of Artificial Sequence: Synthetic oligonucleotide"
  modified_base (1)..(1): 2'-OMe-nucleotide
  misc_feature (1)..(2): /note="phosphorothioate bond"
  modified_base (2)..(2): 2'-fluoro-nucleotide
  misc_feature (2)..(3): /note="phosphorothioate bond"
  modified_base (3)..(3): 2'-OMe-nucleotide
  modified_base (4)..(4): 2'-fluoro-nucleotide
  modified_base (5)..(5): 2'-OMe-nucleotide
  modified_base (6)..(6): 2'-OMe-nucleotide
  modified_base (7)..(7): 2'-OMe-nucleotide
  modified_base (8)..(8): 2'-OMe-nucleotide
  modified_base (9)..(9): 2'-fluoro-nucleotide
  modified_base (10)..(10): 2'-OMe-nucleotide
  modified_base (11)..(11): 2'-OMe-nucleotide
  modified_base (12)..(12): 2'-OMe-nucleotide
  modified_base (13)..(13): 2'-OMe-nucleotide
  modified_base (14)..(14): 2'-fluoro-nucleotide
  modified_base (15)..(15): 2'-OMe-nucleotide
  modified_base (16)..(16): 2'-fluoro-nucleotide
  modified_base (17)..(17): 2'-OMe-nucleotide
  modified_base (18)..(18): 2'-OMe-nucleotide
  modified_base (19)..(19): 2'-OMe-nucleotide
  misc_feature (19)..(20): /note="phosphorothioate bond"
  modified_base (20)..(20): 2'-OMe-nucleotide
  misc_feature (20)..(21): /note="phosphorothioate bond"
  modified_base (21)..(21): 2'-OMe-nucleotide
guaugugccuugauaacucaa

SEQ ID NO: 1443 - DNA, 21 bp, Artificial Sequence
  source: /note="Description of Artificial Sequence: Synthetic oligonucleotide"
  source: /note="Description of Combined DNA/RNA Molecule: Synthetic oligonucleotide"
  modified_base (1)..(1): 2'-fluoro-nucleotide
  misc_feature (1)..(2): /note="phosphorothioate bond"
  modified_base (2)..(2): 2'-fluoro-nucleotide
  misc_feature (2)..(3): /note="phosphorothioate bond"
  modified_base (3)..(3): 2'-OMe-nucleotide
  modified_base (4)..(4): 2'-fluoro-nucleotide
  modified_base (5)..(5): 2'-OMe-nucleotide
  modified_base (6)..(6): 2'-fluoro-nucleotide
  modified_base (7)..(7): 2'-OMe-nucleotide
  modified_base (8)..(8): 2'-fluoro-nucleotide
  modified_base (9)..(9): 2'-OMe-nucleotide
  modified_base (10)..(10): 2'-fluoro-nucleotide
  modified_base (11)..(11): 2'-OMe-nucleotide
  modified_base (12)..(12): 2'-OMe-nucleotide
  modified_base (13)..(13): 2'-OMe-nucleotide
  modified_base (14)..(14): 2'-fluoro-nucleotide
  modified_base (15)..(15): 2'-OMe-nucleotide
  modified_base (16)..(16): 2'-fluoro-nucleotide
  modified_base (17)..(17): 2'-OMe-nucleotide
  modified_base (18)..(18): 2'-fluoro-nucleotide
  modified_base (19)..(19): 2'-OMe-nucleotide
  misc_feature (19)..(20): /note="phosphorothioate bond"
  modified_base (20)..(20): dT
  misc_feature (20)..(21): /note="phosphorothioate bond"
  modified_base (21)..(21): dT
guaugugccuugauaacuctt

SEQ ID NO: 1444 - RNA, 21 nt, Artificial Sequence
  source: /note="Description of Artificial Sequence: Synthetic oligonucleotide"
  modified_base (1)..(1): 2'-OMe-nucleotide
  misc_feature (1)..(2): /note="phosphorothioate bond"
  modified_base (2)..(2): 2'-fluoro-nucleotide
  misc_feature (2)..(3): /note="phosphorothioate bond"
  modified_base (3)..(3): 2'-OMe-nucleotide
  modified_base (4)..(4): 2'-fluoro-nucleotide
  modified_base (5)..(5): 2'-OMe-nucleotide
  modified_base (6)..(6): 2'-OMe-nucleotide
  modified_base (7)..(7): 2'-OMe-nucleotide
  modified_base (8)..(8): 2'-OMe-nucleotide
  modified_base (9)..(9): 2'-OMe-nucleotide
  modified_base (10)..(10): 2'-OMe-nucleotide
  modified_base (11)..(11): 2'-OMe-nucleotide
  modified_base (12)..(12): 2'-OMe-nucleotide
  modified_base (13)..(13): 2'-OMe-nucleotide
  modified_base (14)..(14): 2'-fluoro-nucleotide
  modified_base (15)..(15): 2'-OMe-nucleotide
  modified_base (16)..(16): 2'-fluoro-nucleotide
  modified_base (17)..(17): 2'-OMe-nucleotide
  modified_base (18)..(18): 2'-OMe-nucleotide
  modified_base (19)..(19): 2'-OMe-nucleotide
  misc_feature (19)..(20): /note="phosphorothioate bond"
  modified_base (20)..(20): Locked nucleic acid (LNA) nucleotide
  misc_feature (20)..(21): /note="phosphorothioate bond"
  modified_base (21)..(21): Locked nucleic acid (LNA) nucleotide
guaugugccuugauaacucaa

SEQ ID NO: 1445 - RNA, 21 nt, Artificial Sequence
  source: /note="Description of Artificial Sequence: Synthetic oligonucleotide"
  modified_base (1)..(1): 2'-OMe-nucleotide
  misc_feature (1)..(2): /note="phosphorothioate bond"
  modified_base (2)..(2): 2'-fluoro-nucleotide
  misc_feature (2)..(3): /note="phosphorothioate bond"
  modified_base (3)..(3): 2'-OMe-nucleotide
  modified_base (4)..(4): 2'-OMe-nucleotide
  modified_base (5)..(5): 2'-OMe-nucleotide
  modified_base (6)..(6): 2'-fluoro-nucleotide
  modified_base (7)..(7): 2'-OMe-nucleotide
  modified_base (8)..(8): 2'-OMe-nucleotide
  modified_base (9)..(9): 2'-OMe-nucleotide
  modified_base (10)..(10): 2'-OMe-nucleotide
  modified_base (11)..(11): 2'-OMe-nucleotide
  modified_base (12)..(12): 2'-OMe-nucleotide
  modified_base (13)..(13): 2'-OMe-nucleotide
  modified_base (14)..(14): 2'-fluoro-nucleotide
  modified_base (15)..(15): 2'-OMe-nucleotide
  modified_base (16)..(16): 2'-fluoro-nucleotide
  modified_base (17)..(17): 2'-OMe-nucleotide
  modified_base (18)..(18): 2'-OMe-nucleotide
  modified_base (19)..(19): 2'-OMe-nucleotide
  misc_feature (19)..(20): /note="phosphorothioate bond"
  modified_base (20)..(20): Locked nucleic acid (LNA) nucleotide
  misc_feature (20)..(21): /note="phosphorothioate bond"
  modified_base (21)..(21): Locked nucleic acid (LNA) nucleotide
guaugugccuugauaacucaa

SEQ ID NO: 1446 - RNA, 21 nt, Artificial Sequence
  source: /note="Description of Artificial Sequence: Synthetic oligonucleotide"
  modified_base (1)..(1): 2'-OMe-nucleotide
  misc_feature (1)..(2): /note="phosphorothioate bond"
  modified_base (2)..(2): 2'-fluoro-nucleotide
  misc_feature (2)..(3): /note="phosphorothioate bond"
  modified_base (3)..(3): 2'-OMe-nucleotide
  modified_base (4)..(4): 2'-fluoro-nucleotide
  modified_base (5)..(5): 2'-OMe-nucleotide
  modified_base (6)..(6): 2'-OMe-nucleotide
  modified_base (7)..(7): 2'-OMe-nucleotide
  modified_base (8)..(8): 2'-fluoro-nucleotide
  modified_base (9)..(9): 2'-fluoro-nucleotide
  modified_base (10)..(10): 2'-OMe-nucleotide
  modified_base (11)..(11): 2'-OMe-nucleotide
  modified_base (12)..(12): 2'-OMe-nucleotide
  modified_base (13)..(13): 2'-OMe-nucleotide
  modified_base (14)..(14): 2'-fluoro-nucleotide
  modified_base (15)..(15): 2'-OMe-nucleotide
  modified_base (16)..(16): 2'-fluoro-nucleotide
  modified_base (17)..(17): 2'-OMe-nucleotide
  modified_base (18)..(18): 2'-OMe-nucleotide
  modified_base (19)..(19): 2'-OMe-nucleotide
  misc_feature (19)..(20): /note="phosphorothioate bond"
  modified_base (20)..(20): Locked nucleic acid (LNA) nucleotide
  misc_feature (20)..(21): /note="phosphorothioate bond"
  modified_base (21)..(21): Locked nucleic acid (LNA) nucleotide
guaugugccuugauaacucaa

SEQ ID NO: 1447 - RNA, 21 nt, Artificial Sequence
  source: /note="Description of Artificial Sequence: Synthetic oligonucleotide"
  modified_base (1)..(1): 2'-OMe-nucleotide
  misc_feature (1)..(2): /note="phosphorothioate bond"
  modified_base (2)..(2): 2'-fluoro-nucleotide
  misc_feature (2)..(3): /note="phosphorothioate bond"
  modified_base (3)..(3): 2'-OMe-nucleotide
  modified_base (4)..(4): 2'-fluoro-nucleotide
  modified_base (5)..(5): 2'-OMe-nucleotide
  modified_base (6)..(6): 2'-OMe-nucleotide
  modified_base (7)..(7): 2'-OMe-nucleotide
  modified_base (8)..(8): 2'-OMe-nucleotide
  modified_base (9)..(9): 2'-fluoro-nucleotide
  modified_base (10)..(10): 2'-OMe-nucleotide
  modified_base (11)..(11): 2'-OMe-nucleotide
  modified_base (12)..(12): 2'-OMe-nucleotide
  modified_base (13)..(13): 2'-OMe-nucleotide
  modified_base (14)..(14): 2'-fluoro-nucleotide
  modified_base (15)..(15): 2'-OMe-nucleotide
  modified_base (16)..(16): 2'-fluoro-nucleotide
  modified_base (17)..(17): 2'-OMe-nucleotide
  modified_base (18)..(18): 2'-OMe-nucleotide
  modified_base (19)..(19): 2'-OMe-nucleotide
  misc_feature (19)..(20): /note="phosphorothioate bond"
  modified_base (20)..(20): Locked nucleic acid (LNA) nucleotide
  misc_feature (20)..(21): /note="phosphorothioate bond"
  modified_base (21)..(21): Locked nucleic acid (LNA) nucleotide
guaugugccuugauaacucaa

SEQ ID NO: 1448 - RNA, 21 nt, Artificial Sequence
  source: /note="Description of Artificial Sequence: Synthetic oligonucleotide"
  modified_base (1)..(1): 2'-OMe-nucleotide
  misc_feature (1)..(2): /note="phosphorothioate bond"
  modified_base (2)..(2): 2'-fluoro-nucleotide
  misc_feature (2)..(3): /note="phosphorothioate bond"
  modified_base (3)..(3): 2'-OMe-nucleotide
  modified_base (4)..(4): 2'-fluoro-nucleotide
  modified_base (5)..(5): 2'-OMe-nucleotide
  modified_base (6)..(6): 2'-OMe-nucleotide
  modified_base (7)..(7): 2'-OMe-nucleotide
  modified_base (8)..(8): 2'-OMe-nucleotide
  modified_base (9)..(9): 2'-OMe-nucleotide
  modified_base (10)..(10): 2'-OMe-nucleotide
  modified_base (11)..(11): 2'-OMe-nucleotide
  modified_base (12)..(12): 2'-OMe-nucleotide
  modified_base (13)..(13): 2'-OMe-nucleotide
  modified_base (14)..(14): 2'-fluoro-nucleotide
  modified_base (15)..(15): 2'-OMe-nucleotide
  modified_base (16)..(16): 2'-fluoro-nucleotide
  modified_base (17)..(17): 2'-OMe-nucleotide
  modified_base (18)..(18): 2'-OMe-nucleotide
  modified_base (19)..(19): 2'-OMe-nucleotide
  misc_feature (19)..(20): /note="phosphorothioate bond"
  modified_base (20)..(20): 2'-OMe-nucleotide
  misc_feature (20)..(21): /note="phosphorothioate bond"
  modified_base (21)..(21): 2'-OMe-nucleotide
guaugugccuugauaacucaa

SEQ ID NO: 1449 - RNA, 21 nt, Artificial Sequence
  source: /note="Description of Artificial Sequence: Synthetic oligonucleotide"
  modified_base (1)..(1): 2'-OMe-nucleotide
  misc_feature (1)..(2): /note="phosphorothioate bond"
  modified_base (2)..(2): 2'-fluoro-nucleotide
  misc_feature (2)..(3): /note="phosphorothioate bond"
  modified_base (3)..(3): 2'-OMe-nucleotide
  modified_base (4)..(4): 2'-OMe-nucleotide
  modified_base (5)..(5): 2'-OMe-nucleotide
  modified_base (6)..(6): 2'-fluoro-nucleotide
  modified_base (7)..(7): 2'-OMe-nucleotide
  modified_base (8)..(8): 2'-OMe-nucleotide
  modified_base (9)..(9): 2'-OMe-nucleotide
  modified_base (10)..(10): 2'-OMe-nucleotide
  modified_base (11)..(11): 2'-OMe-nucleotide
  modified_base (12)..(12): 2'-OMe-nucleotide
  modified_base (13)..(13): 2'-OMe-nucleotide
  modified_base (14)..(14): 2'-fluoro-nucleotide
  modified_base (15)..(15): 2'-OMe-nucleotide
  modified_base (16)..(16): 2'-fluoro-nucleotide
  modified_base (17)..(17): 2'-OMe-nucleotide
  modified_base (18)..(18): 2'-OMe-nucleotide
  modified_base (19)..(19): 2'-OMe-nucleotide
  misc_feature (19)..(20): /note="phosphorothioate bond"
  modified_base (20)..(20): 2'-OMe-nucleotide
  misc_feature (20)..(21): /note="phosphorothioate bond"
  modified_base (21)..(21): 2'-OMe-nucleotide
guaugugccuugauaacucaa

SEQ ID NO: 1450 - RNA, 21 nt, Artificial Sequence
  source: /note="Description of Artificial Sequence: Synthetic oligonucleotide"
  modified_base (1)..(1): 2'-OMe-nucleotide
  misc_feature (1)..(2): /note="phosphorothioate bond"
  modified_base (2)..(2): 2'-fluoro-nucleotide
  misc_feature (2)..(3): /note="phosphorothioate bond"
  modified_base (3)..(3): 2'-OMe-nucleotide
  modified_base (4)..(4): 2'-fluoro-nucleotide
  modified_base (5)..(5): 2'-OMe-nucleotide
  modified_base (6)..(6): 2'-OMe-nucleotide
  modified_base (7)..(7): 2'-OMe-nucleotide
  modified_base (8)..(8): 2'-fluoro-nucleotide
  modified_base (9)..(9): 2'-fluoro-nucleotide
  modified_base (10)..(10): 2'-OMe-nucleotide
  modified_base (11)..(11): 2'-OMe-nucleotide
  modified_base (12)..(12): 2'-OMe-nucleotide
  modified_base (13)..(13): 2'-OMe-nucleotide
  modified_base (14)..(14): 2'-fluoro-nucleotide
  modified_base (15)..(15): 2'-OMe-nucleotide
  modified_base (16)..(16): 2'-fluoro-nucleotide
  modified_base (17)..(17): 2'-OMe-nucleotide
  modified_base (18)..(18): 2'-OMe-nucleotide
  modified_base (19)..(19): 2'-OMe-nucleotide
  misc_feature (19)..(20): /note="phosphorothioate bond"
  modified_base (20)..(20): 2'-OMe-nucleotide
  misc_feature (20)..(21): /note="phosphorothioate bond"
  modified_base (21)..(21): 2'-OMe-nucleotide
guaugugccuugauaacucaa

SEQ ID NO: 1451 - RNA, 21 nt, Artificial Sequence
  source: /note="Description of Artificial Sequence: Synthetic oligonucleotide"
  modified_base (1)..(1): 2'-OMe-nucleotide
  misc_feature (1)..(2): /note="phosphorothioate bond"
  modified_base (2)..(2): 2'-fluoro-nucleotide
  misc_feature (2)..(3): /note="phosphorothioate bond"
  modified_base (3)..(3): 2'-OMe-nucleotide
  modified_base (4)..(4): 2'-fluoro-nucleotide
  modified_base (5)..(5): 2'-OMe-nucleotide
  modified_base (6)..(6): 2'-OMe-nucleotide
  modified_base (7)..(7): 2'-OMe-nucleotide
  modified_base (8)..(8): 2'-OMe-nucleotide
  modified_base (9)..(9): 2'-fluoro-nucleotide
  modified_base (10)..(10): 2'-OMe-nucleotide
  modified_base (11)..(11): 2'-OMe-nucleotide
  modified_base (12)..(12): 2'-OMe-nucleotide
  modified_base (13)..(13): 2'-OMe-nucleotide
  modified_base (14)..(14): 2'-fluoro-nucleotide
  modified_base (15)..(15): 2'-OMe-nucleotide
  modified_base (16)..(16): 2'-fluoro-nucleotide
  modified_base (17)..(17): 2'-OMe-nucleotide
  modified_base (18)..(18): 2'-OMe-nucleotide
  modified_base (19)..(19): 2'-OMe-nucleotide
  misc_feature (19)..(20): /note="phosphorothioate bond"
  modified_base (20)..(20): 2'-OMe-nucleotide
  misc_feature (20)..(21): /note="phosphorothioate bond"
  modified_base (21)..(21): 2'-OMe-nucleotide
guaugugccuugauaacucaa

SEQ ID NO: 1452 - DNA, 21 bp, Artificial Sequence
  source: /note="Description of Artificial Sequence: Synthetic oligonucleotide"
  source: /note="Description of Combined DNA/RNA Molecule: Synthetic oligonucleotide"
  modified_base (1)..(1): 2'-fluoro-nucleotide
  misc_feature (1)..(2): /note="phosphorothioate bond"
  modified_base (2)..(2): 2'-fluoro-nucleotide
  misc_feature (2)..(3): /note="phosphorothioate bond"
  modified_base (3)..(3): 2'-OMe-nucleotide
  modified_base (4)..(4): 2'-fluoro-nucleotide
  modified_base (5)..(5): 2'-OMe-nucleotide
  modified_base (6)..(6): 2'-fluoro-nucleotide
  modified_base (7)..(7): 2'-OMe-nucleotide
  modified_base (8)..(8): 2'-fluoro-nucleotide
  modified_base (9)..(9): 2'-OMe-nucleotide
  modified_base (10)..(10): 2'-fluoro-nucleotide
  modified_base (11)..(11): 2'-OMe-nucleotide
  modified_base (12)..(12): 2'-OMe-nucleotide
  modified_base (13)..(13): 2'-OMe-nucleotide
  modified_base (14)..(14): 2'-fluoro-nucleotide
  modified_base (15)..(15): 2'-OMe-nucleotide
  modified_base (16)..(16): 2'-fluoro-nucleotide
  modified_base (17)..(17): 2'-OMe-nucleotide
  modified_base (18)..(18): 2'-fluoro-nucleotide
  modified_base (19)..(19): 2'-OMe-nucleotide
  misc_feature (19)..(20): /note="phosphorothioate bond"
  modified_base (20)..(20): dT
  misc_feature (20)..(21): /note="phosphorothioate bond"
  modified_base (21)..(21): dT
guaugugccuugauaacuctt

SEQ ID NO: 1453 - RNA, 21 nt, Artificial Sequence
  source: /note="Description of Artificial Sequence: Synthetic oligonucleotide"
  modified_base (1)..(1): 2'-OMe-nucleotide
  misc_feature (1)..(2): /note="phosphorothioate bond"
  modified_base (2)..(2): 2'-fluoro-nucleotide
  misc_feature (2)..(3): /note="phosphorothioate bond"
  modified_base (3)..(3): 2'-OMe-nucleotide
  modified_base (4)..(4): 2'-fluoro-nucleotide
  modified_base (5)..(5): 2'-OMe-nucleotide
  modified_base (6)..(6): 2'-OMe-nucleotide
  modified_base (7)..(7): 2'-OMe-nucleotide
  modified_base (8)..(8): 2'-OMe-nucleotide
  modified_base (9)..(9): 2'-OMe-nucleotide
  modified_base (10)..(10): 2'-OMe-nucleotide
  modified_base (11)..(11): 2'-OMe-nucleotide
  modified_base (12)..(12): 2'-OMe-nucleotide
  modified_base (13)..(13): 2'-OMe-nucleotide
  modified_base (14)..(14): 2'-fluoro-nucleotide
  modified_base (15)..(15): 2'-OMe-nucleotide
  modified_base (16)..(16): 2'-fluoro-nucleotide
  modified_base (17)..(17): 2'-OMe-nucleotide
  modified_base (18)..(18): 2'-OMe-nucleotide
  modified_base (19)..(19): 2'-OMe-nucleotide
  misc_feature (19)..(20): /note="phosphorothioate bond"
  modified_base (20)..(20): Locked nucleic acid (LNA) nucleotide
  misc_feature (20)..(21): /note="phosphorothioate bond"
  modified_base (21)..(21): Locked nucleic acid (LNA) nucleotide
guaugugccuugauaacucaa

SEQ ID NO: 1454 - RNA, 21 nt, Artificial Sequence
  source: /note="Description of Artificial Sequence: Synthetic oligonucleotide"
  modified_base (1)..(1): 2'-OMe-nucleotide
  misc_feature (1)..(2): /note="phosphorothioate bond"
  modified_base (2)..(2): 2'-fluoro-nucleotide
  misc_feature (2)..(3): /note="phosphorothioate bond"
  modified_base (3)..(3): 2'-OMe-nucleotide
  modified_base (4)..(4): 2'-OMe-nucleotide
  modified_base (5)..(5): 2'-OMe-nucleotide
  modified_base (6)..(6): 2'-fluoro-nucleotide
  modified_base (7)..(7): 2'-OMe-nucleotide
  modified_base (8)..(8): 2'-OMe-nucleotide
  modified_base (9)..(9): 2'-OMe-nucleotide
  modified_base (10)..(10): 2'-OMe-nucleotide
  modified_base (11)..(11): 2'-OMe-nucleotide
  modified_base (12)..(12): 2'-OMe-nucleotide
  modified_base (13)..(13): 2'-OMe-nucleotide
  modified_base (14)..(14): 2'-fluoro-nucleotide
  modified_base (15)..(15): 2'-OMe-nucleotide
  modified_base (16)..(16): 2'-fluoro-nucleotide
  modified_base (17)..(17): 2'-OMe-nucleotide
  modified_base (18)..(18): 2'-OMe-nucleotide
  modified_base (19)..(19): 2'-OMe-nucleotide
  misc_feature (19)..(20): /note="phosphorothioate bond"
  modified_base (20)..(20): Locked nucleic acid (LNA) nucleotide
  misc_feature (20)..(21): /note="phosphorothioate bond"
  modified_base (21)..(21): Locked nucleic acid (LNA) nucleotide
guaugugccuugauaacucaa

SEQ ID NO: 1455 - RNA, 21 nt, Artificial Sequence
  source: /note="Description of Artificial Sequence: Synthetic oligonucleotide"
  modified_base (1)..(1): 2'-OMe-nucleotide
  misc_feature (1)..(2): /note="phosphorothioate bond"
  modified_base (2)..(2): 2'-fluoro-nucleotide
  misc_feature (2)..(3): /note="phosphorothioate bond"
  modified_base (3)..(3): 2'-OMe-nucleotide
  modified_base (4)..(4): 2'-fluoro-nucleotide
  modified_base (5)..(5): 2'-OMe-nucleotide
  modified_base (6)..(6): 2'-OMe-nucleotide
  modified_base (7)..(7): 2'-OMe-nucleotide
  modified_base (8)..(8): 2'-fluoro-nucleotide
  modified_base (9)..(9): 2'-fluoro-nucleotide
  modified_base (10)..(10): 2'-OMe-nucleotide
  modified_base (11)..(11): 2'-OMe-nucleotide
  modified_base (12)..(12): 2'-OMe-nucleotide
  modified_base (13)..(13): 2'-OMe-nucleotide
  modified_base (14)..(14): 2'-fluoro-nucleotide
  modified_base (15)..(15): 2'-OMe-nucleotide
  modified_base (16)..(16): 2'-fluoro-nucleotide
  modified_base (17)..(17): 2'-OMe-nucleotide
  modified_base (18)..(18): 2'-OMe-nucleotide
  modified_base (19)..(19): 2'-OMe-nucleotide
  misc_feature (19)..(20): /note="phosphorothioate bond"
  modified_base (20)..(20): Locked nucleic acid (LNA) nucleotide
  misc_feature (20)..(21): /note="phosphorothioate bond"
  modified_base (21)..(21): Locked nucleic acid (LNA) nucleotide
guaugugccuugauaacucaa

SEQ ID NO: 1456 - RNA, 21 nt, Artificial Sequence
  source: /note="Description of Artificial Sequence: Synthetic oligonucleotide"
  modified_base (1)..(1): 2'-OMe-nucleotide
  misc_feature (1)..(2): /note="phosphorothioate bond"
  modified_base (2)..(2): 2'-fluoro-nucleotide
  misc_feature (2)..(3): /note="phosphorothioate bond"
  modified_base (3)..(3): 2'-OMe-nucleotide
  modified_base (4)..(4): 2'-fluoro-nucleotide
  modified_base (5)..(5): 2'-OMe-nucleotide
  modified_base (6)..(6): 2'-OMe-nucleotide
  modified_base (7)..(7): 2'-OMe-nucleotide
  modified_base (8)..(8): 2'-OMe-nucleotide
  modified_base (9)..(9): 2'-fluoro-nucleotide
  modified_base (10)..(10): 2'-OMe-nucleotide
  modified_base (11)..(11): 2'-OMe-nucleotide
  modified_base (12)..(12): 2'-OMe-nucleotide
  modified_base (13)..(13): 2'-OMe-nucleotide
  modified_base (14)..(14): 2'-fluoro-nucleotide
  modified_base (15)..(15): 2'-OMe-nucleotide
  modified_base (16)..(16): 2'-fluoro-nucleotide
  modified_base (17)..(17): 2'-OMe-nucleotide
  modified_base (18)..(18): 2'-OMe-nucleotide
  modified_base (19)..(19): 2'-OMe-nucleotide
  misc_feature (19)..(20): /note="phosphorothioate bond"
  modified_base (20)..(20): Locked nucleic acid (LNA) nucleotide
  misc_feature (20)..(21): /note="phosphorothioate bond"
  modified_base (21)..(21): Locked nucleic acid (LNA) nucleotide
guaugugccuugauaacucaa

SEQ ID NO: 1457 - RNA, 21 nt, Artificial Sequence
  source: /note="Description of Artificial Sequence: Synthetic oligonucleotide"
  modified_base (1)..(1): 2'-OMe-nucleotide
  misc_feature (1)..(2): /note="phosphorothioate bond"
  modified_base (2)..(2): 2'-fluoro-nucleotide
  misc_feature (2)..(3): /note="phosphorothioate bond"
  modified_base (3)..(3): 2'-OMe-nucleotide
  modified_base (4)..(4): 2'-fluoro-nucleotide
  modified_base (5)..(5): 2'-OMe-nucleotide
  modified_base (6)..(6): 2'-OMe-nucleotide
  modified_base (7)..(7): 2'-OMe-nucleotide
  modified_base (8)..(8): 2'-OMe-nucleotide
  modified_base (9)..(9): 2'-OMe-nucleotide
  modified_base (10)..(10): 2'-OMe-nucleotide
  modified_base (11)..(11): 2'-OMe-nucleotide
  modified_base (12)..(12): 2'-OMe-nucleotide
  modified_base (13)..(13): 2'-OMe-nucleotide
  modified_base (14)..(14): 2'-fluoro-nucleotide
  modified_base (15)..(15): 2'-OMe-nucleotide
  modified_base (16)..(16): 2'-fluoro-nucleotide
  modified_base (17)..(17): 2'-OMe-nucleotide
  modified_base (18)..(18): 2'-OMe-nucleotide
  modified_base (19)..(19): 2'-OMe-nucleotide
  misc_feature (19)..(20): /note="phosphorothioate bond"
  modified_base (20)..(20): 2'-OMe-nucleotide
  misc_feature (20)..(21): /note="phosphorothioate bond"
  modified_base (21)..(21): 2'-OMe-nucleotide
guaugugccuugauaacucaa

SEQ ID NO: 1458 - RNA, 21 nt, Artificial Sequence
  source: /note="Description of Artificial Sequence: Synthetic oligonucleotide"
  modified_base (1)..(1): 2'-OMe-nucleotide
  misc_feature (1)..(2): /note="phosphorothioate bond"
  modified_base (2)..(2): 2'-fluoro-nucleotide
  misc_feature (2)..(3): /note="phosphorothioate bond"
  modified_base (3)..(3): 2'-OMe-nucleotide
  modified_base (4)..(4): 2'-OMe-nucleotide
  modified_base (5)..(5): 2'-OMe-nucleotide
  modified_base (6)..(6): 2'-fluoro-nucleotide
  modified_base (7)..(7): 2'-OMe-nucleotide
  modified_base (8)..(8): 2'-OMe-nucleotide
  modified_base (9)..(9): 2'-OMe-nucleotide
  modified_base (10)..(10): 2'-OMe-nucleotide
  modified_base (11)..(11): 2'-OMe-nucleotide
  modified_base (12)..(12): 2'-OMe-nucleotide
  modified_base (13)..(13): 2'-OMe-nucleotide
  modified_base (14)..(14): 2'-fluoro-nucleotide
  modified_base (15)..(15): 2'-OMe-nucleotide
  modified_base (16)..(16): 2'-fluoro-nucleotide
  modified_base (17)..(17): 2'-OMe-nucleotide
  modified_base (18)..(18): 2'-OMe-nucleotide
  modified_base (19)..(19): 2'-OMe-nucleotide
  misc_feature (19)..(20): /note="phosphorothioate bond"
  modified_base (20)..(20): 2'-OMe-nucleotide
  misc_feature (20)..(21): /note="phosphorothioate bond"
  modified_base (21)..(21): 2'-OMe-nucleotide
guaugugccuugauaacucaa

SEQ ID NO: 1459 - RNA, 21 nt, Artificial Sequence
  source: /note="Description of Artificial Sequence: Synthetic oligonucleotide"
  modified_base (1)..(1): 2'-OMe-nucleotide
  misc_feature (1)..(2): /note="phosphorothioate bond"
  modified_base (2)..(2): 2'-fluoro-nucleotide
  misc_feature (2)..(3): /note="phosphorothioate bond"
  modified_base (3)..(3): 2'-OMe-nucleotide
  modified_base (4)..(4): 2'-fluoro-nucleotide
  modified_base (5)..(5): 2'-OMe-nucleotide
  modified_base (6)..(6): 2'-OMe-nucleotide
  modified_base (7)..(7): 2'-OMe-nucleotide
  modified_base (8)..(8): 2'-fluoro-nucleotide
  modified_base (9)..(9): 2'-fluoro-nucleotide
  modified_base (10)..(10): 2'-OMe-nucleotide
  modified_base (11)..(11): 2'-OMe-nucleotide
  modified_base (12)..(12): 2'-OMe-nucleotide
  modified_base (13)..(13): 2'-OMe-nucleotide
  modified_base (14)..(14): 2'-fluoro-nucleotide
  modified_base (15)..(15): 2'-OMe-nucleotide
  modified_base (16)..(16): 2'-fluoro-nucleotide
  modified_base (17)..(17): 2'-OMe-nucleotide
  modified_base (18)..(18): 2'-OMe-nucleotide
  modified_base (19)..(19): 2'-OMe-nucleotide
  misc_feature (19)..(20): /note="phosphorothioate bond"
  modified_base (20)..(20): 2'-OMe-nucleotide
  misc_feature (20)..(21): /note="phosphorothioate bond"
  modified_base (21)..(21): 2'-OMe-nucleotide
guaugugccuugauaacucaa

SEQ ID NO: 1460 - RNA, 21 nt, Artificial Sequence
  source: /note="Description of Artificial Sequence: Synthetic oligonucleotide"
  modified_base (1)..(1): 2'-OMe-nucleotide
  misc_feature (1)..(2): /note="phosphorothioate bond"
  modified_base (2)..(2): 2'-fluoro-nucleotide
  misc_feature (2)..(3): /note="phosphorothioate bond"
  modified_base (3)..(3): 2'-OMe-nucleotide
  modified_base (4)..(4): 2'-fluoro-nucleotide
  modified_base (5)..(5): 2'-OMe-nucleotide
  modified_base (6)..(6): 2'-OMe-nucleotide
  modified_base (7)..(7): 2'-OMe-nucleotide
  modified_base (8)..(8): 2'-OMe-nucleotide
  modified_base (9)..(9): 2'-fluoro-nucleotide
  modified_base (10)..(10): 2'-OMe-nucleotide
  modified_base (11)..(11): 2'-OMe-nucleotide
  modified_base (12)..(12): 2'-OMe-nucleotide
  modified_base (13)..(13): 2'-OMe-nucleotide
  modified_base (14)..(14): 2'-fluoro-nucleotide
  modified_base (15)..(15): 2'-OMe-nucleotide
  modified_base (16)..(16): 2'-fluoro-nucleotide
  modified_base (17)..(17): 2'-OMe-nucleotide
  modified_base (18)..(18): 2'-OMe-nucleotide
  modified_base (19)..(19): 2'-OMe-nucleotide
  misc_feature (19)..(20): /note="phosphorothioate bond"
  modified_base (20)..(20): 2'-OMe-nucleotide
  misc_feature (20)..(21): /note="phosphorothioate bond"
  modified_base (21)..(21): 2'-OMe-nucleotide
guaugugccuugauaacucaa

SEQ ID NO: 1461 - DNA, 21 bp, Artificial Sequence
  source: /note="Description of Artificial Sequence: Synthetic oligonucleotide"
  source: /note="Description of Combined DNA/RNA Molecule: Synthetic oligonucleotide"
  modified_base (1)..(1): 2'-fluoro-nucleotide
  misc_feature (1)..(2): /note="phosphorothioate bond"
  modified_base (2)..(2): 2'-fluoro-nucleotide
  misc_feature (2)..(3): /note="phosphorothioate bond"
  modified_base (3)..(3): 2'-OMe-nucleotide
  modified_base (4)..(4): 2'-fluoro-nucleotide
  modified_base (5)..(5): 2'-OMe-nucleotide
  modified_base (6)..(6): 2'-fluoro-nucleotide
  modified_base (7)..(7): 2'-OMe-nucleotide
  modified_base (8)..(8): 2'-fluoro-nucleotide
  modified_base (9)..(9): 2'-OMe-nucleotide
  modified_base (10)..(10): 2'-fluoro-nucleotide
  modified_base (11)..(11): 2'-OMe-nucleotide
  modified_base (12)..(12): 2'-OMe-nucleotide
  modified_base (13)..(13): 2'-OMe-nucleotide
  modified_base (14)..(14): 2'-fluoro-nucleotide
  modified_base (15)..(15): 2'-OMe-nucleotide
  modified_base (16)..(16): 2'-fluoro-nucleotide
  modified_base (17)..(17): 2'-OMe-nucleotide
  modified_base (18)..(18): 2'-fluoro-nucleotide
  modified_base (19)..(19): 2'-OMe-nucleotide
  misc_feature (19)..(20): /note="phosphorothioate bond"
  modified_base (20)..(20): dT
  misc_feature (20)..(21): /note="phosphorothioate bond"
  modified_base (21)..(21): dT
guaugugccuugauaacuctt

SEQ ID NO: 1462 - RNA, 21 nt, Artificial Sequence
  source: /note="Description of Artificial Sequence: Synthetic oligonucleotide"
  modified_base (1)..(1): 2'-OMe-nucleotide
  misc_feature (1)..(2): /note="phosphorothioate bond"
  modified_base (2)..(2): 2'-fluoro-nucleotide
  misc_feature (2)..(3): /note="phosphorothioate bond"
  modified_base (3)..(3): 2'-OMe-nucleotide
  modified_base (4)..(4): 2'-fluoro-nucleotide
  modified_base (5)..(5): 2'-OMe-nucleotide
  modified_base (6)..(6): 2'-OMe-nucleotide
  modified_base (7)..(7): 2'-OMe-nucleotide
  modified_base (8)..(8): 2'-OMe-nucleotide
  modified_base (9)..(9): 2'-OMe-nucleotide
  modified_base (10)..(10): 2'-OMe-nucleotide
  modified_base (11)..(11): 2'-OMe-nucleotide
  modified_base (12)..(12): 2'-OMe-nucleotide
  modified_base (13)..(13): 2'-OMe-nucleotide
  modified_base (14)..(14): 2'-fluoro-nucleotide
  modified_base (15)..(15): 2'-OMe-nucleotide
  modified_base (16)..(16): 2'-fluoro-nucleotide
  modified_base (17)..(17): 2'-OMe-nucleotide
  modified_base (18)..(18): 2'-OMe-nucleotide
  modified_base (19)..(19): 2'-OMe-nucleotide
  misc_feature (19)..(20): /note="phosphorothioate bond"
  modified_base (20)..(20): 2'-OMe-nucleotide
  misc_feature (20)..(21): /note="phosphorothioate bond"
  modified_base (21)..(21): 2'-OMe-nucleotide
guaugugccuugauaacucaa

SEQ ID NO: 1463 - RNA, 21 nt, Artificial Sequence
  source: /note="Description of Artificial Sequence: Synthetic oligonucleotide"
  modified_base (1)..(1): 2'-OMe-nucleotide
  misc_feature (1)..(2): /note="phosphorothioate bond"
  modified_base (2)..(2): 2'-fluoro-nucleotide
  misc_feature (2)..(3): /note="phosphorothioate bond"
  modified_base (3)..(3): 2'-OMe-nucleotide
  modified_base (4)..(4): 2'-OMe-nucleotide
  modified_base (5)..(5): 2'-OMe-nucleotide
  modified_base (6)..(6): 2'-fluoro-nucleotide
  modified_base (7)..(7): 2'-OMe-nucleotide
  modified_base (8)..(8): 2'-OMe-nucleotide
  modified_base (9)..(9): 2'-OMe-nucleotide
  modified_base (10)..(10): 2'-OMe-nucleotide
  modified_base (11)..(11): 2'-OMe-nucleotide
  modified_base (12)..(12): 2'-OMe-nucleotide
  modified_base (13)..(13): 2'-OMe-nucleotide
  modified_base (14)..(14): 2'-fluoro-nucleotide
  modified_base (15)..(15): 2'-OMe-nucleotide
  modified_base (16)..(16): 2'-fluoro-nucleotide
  modified_base (17)..(17): 2'-OMe-nucleotide
  modified_base (18)..(18): 2'-OMe-nucleotide
  modified_base (19)..(19): 2'-OMe-nucleotide
  misc_feature (19)..(20): /note="phosphorothioate bond"
  modified_base (20)..(20): 2'-OMe-nucleotide
  misc_feature (20)..(21): /note="phosphorothioate bond"
  modified_base (21)..(21): 2'-OMe-nucleotide
guaugugccuugauaacucaa

SEQ ID NO: 1464 - RNA, 21 nt, Artificial Sequence
  source: /note="Description of Artificial Sequence: Synthetic oligonucleotide"
  modified_base (1)..(1): 2'-OMe-nucleotide
  misc_feature (1)..(2): /note="phosphorothioate bond"
  modified_base (2)..(2): 2'-fluoro-nucleotide
  misc_feature (2)..(3): /note="phosphorothioate bond"
  modified_base (3)..(3): 2'-OMe-nucleotide
  modified_base (4)..(4): 2'-fluoro-nucleotide
  modified_base (5)..(5): 2'-OMe-nucleotide
  modified_base (6)..(6): 2'-OMe-nucleotide
  modified_base (7)..(7): 2'-OMe-nucleotide
  modified_base (8)..(8): 2'-fluoro-nucleotide
  modified_base (9)..(9): 2'-fluoro-nucleotide
  modified_base (10)..(10): 2'-OMe-nucleotide
  modified_base (11)..(11): 2'-OMe-nucleotide
  modified_base (12)..(12): 2'-OMe-nucleotide
  modified_base (13)..(13): 2'-OMe-nucleotide
  modified_base (14)..(14): 2'-fluoro-nucleotide
  modified_base (15)..(15): 2'-OMe-nucleotide
  modified_base (16)..(16): 2'-fluoro-nucleotide
  modified_base (17)..(17): 2'-OMe-nucleotide
  modified_base (18)..(18): 2'-OMe-nucleotide
  modified_base (19)..(19): 2'-OMe-nucleotide
  misc_feature (19)..(20): /note="phosphorothioate bond"
  modified_base (20)..(20): 2'-OMe-nucleotide
  misc_feature (20)..(21): /note="phosphorothioate bond"
  modified_base (21)..(21): 2'-OMe-nucleotide
guaugugccuugauaacucaa

SEQ ID NO: 1465 - RNA, 21 nt, Artificial Sequence
  source: /note="Description of Artificial Sequence: Synthetic oligonucleotide"
  modified_base (1)..(1): 2'-OMe-nucleotide
  misc_feature (1)..(2): /note="phosphorothioate bond"
  modified_base (2)..(2): 2'-fluoro-nucleotide
  misc_feature (2)..(3): /note="phosphorothioate bond"
  modified_base (3)..(3): 2'-OMe-nucleotide
  modified_base (4)..(4): 2'-fluoro-nucleotide
  modified_base (5)..(5): 2'-OMe-nucleotide
  modified_base (6)..(6): 2'-OMe-nucleotide
  modified_base (7)..(7): 2'-OMe-nucleotide
  modified_base (8)..(8): 2'-OMe-nucleotide
  modified_base (9)..(9): 2'-fluoro-nucleotide
  modified_base (10)..(10): 2'-OMe-nucleotide
  modified_base (11)..(11): 2'-OMe-nucleotide
  modified_base (12)..(12): 2'-OMe-nucleotide
  modified_base (13)..(13): 2'-OMe-nucleotide
  modified_base (14)..(14): 2'-fluoro-nucleotide
  modified_base (15)..(15): 2'-OMe-nucleotide
  modified_base (16)..(16): 2'-fluoro-nucleotide
  modified_base (17)..(17): 2'-OMe-nucleotide
  modified_base (18)..(18): 2'-OMe-nucleotide
  modified_base (19)..(19): 2'-OMe-nucleotide
  misc_feature (19)..(20): /note="phosphorothioate bond"
  modified_base (20)..(20): 2'-OMe-nucleotide
  misc_feature (20)..(21): /note="phosphorothioate bond"
  modified_base (21)..(21): 2'-OMe-nucleotide
guaugugccuugauaacucaa

SEQ ID NO: 1466 - DNA, 21 bp, Artificial Sequence
  source: /note="Description of Artificial Sequence: Synthetic oligonucleotide"
  source: /note="Description of Combined DNA/RNA Molecule: Synthetic oligonucleotide"
  modified_base (1)..(1): 2'-fluoro-nucleotide
  misc_feature (1)..(2): /note="phosphorothioate bond"
  modified_base (2)..(2): 2'-fluoro-nucleotide
  misc_feature (2)..(3): /note="phosphorothioate bond"
  modified_base (3)..(3): 2'-OMe-nucleotide
  modified_base (4)..(4): 2'-fluoro-nucleotide
  modified_base (5)..(5): 2'-OMe-nucleotide
  modified_base (6)..(6): 2'-fluoro-nucleotide
  modified_base (7)..(7): 2'-OMe-nucleotide
  modified_base (8)..(8): 2'-fluoro-nucleotide
  modified_base (9)..(9): 2'-OMe-nucleotide
  modified_base (10)..(10): 2'-fluoro-nucleotide
  modified_base (11)..(11): 2'-OMe-nucleotide
  modified_base (12)..(12): 2'-OMe-nucleotide
  modified_base (13)..(13): 2'-OMe-nucleotide
  modified_base (14)..(14): 2'-fluoro-nucleotide
  modified_base (15)..(15): 2'-OMe-nucleotide
  modified_base (16)..(16): 2'-fluoro-nucleotide
  modified_base (17)..(17): 2'-OMe-nucleotide
  modified_base (18)..(18): 2'-fluoro-nucleotide
  modified_base (19)..(19): 2'-OMe-nucleotide
  misc_feature (19)..(20): /note="phosphorothioate bond"
  modified_base (20)..(20): dT
  misc_feature (20)..(21): /note="phosphorothioate bond"
  modified_base (21)..(21): dT
guaugugccuugauaacuctt

SEQ ID NO: 1467 - RNA, 21 nt, Artificial Sequence
  source: /note="Description of Artificial Sequence: Synthetic oligonucleotide"
  modified_base (1)..(1): 2'-OMe-nucleotide
  misc_feature (1)..(2): /note="phosphorothioate bond"
  modified_base (2)..(2): 2'-fluoro-nucleotide
  misc_feature (2)..(3): /note="phosphorothioate bond"
  modified_base (3)..(3): 2'-OMe-nucleotide
  modified_base (4)..(4): 2'-fluoro-nucleotide
  modified_base (5)..(5): 2'-OMe-nucleotide
  modified_base (6)..(6): 2'-OMe-nucleotide
  modified_base (7)..(7): 2'-OMe-nucleotide
  modified_base (8)..(8): 2'-OMe-nucleotide
  modified_base (9)..(9): 2'-OMe-nucleotide
  modified_base (10)..(10): 2'-OMe-nucleotide
  modified_base (11)..(11): 2'-OMe-nucleotide
  modified_base (12)..(12): 2'-OMe-nucleotide
  modified_base (13)..(13): 2'-OMe-nucleotide
  modified_base (14)..(14): 2'-fluoro-nucleotide
  modified_base (15)..(15): 2'-OMe-nucleotide
  modified_base (16)..(16): 2'-fluoro-nucleotide
  modified_base (17)..(17): 2'-OMe-nucleotide
  modified_base (18)..(18): 2'-OMe-nucleotide
  modified_base (19)..(19): 2'-OMe-nucleotide
  misc_feature (19)..(20): /note="phosphorothioate bond"
  modified_base (20)..(20): 2'-OMe-nucleotide
  misc_feature (20)..(21): /note="phosphorothioate bond"
  modified_base (21)..(21): 2'-OMe-nucleotide
guaugugccuugauaacucaa

SEQ ID NO: 1468 - RNA, 21 nt, Artificial Sequence
  source: /note="Description of Artificial Sequence: Synthetic oligonucleotide"
  modified_base (1)..(1): 2'-OMe-nucleotide
  misc_feature (1)..(2): /note="phosphorothioate bond"
  modified_base (2)..(2): 2'-fluoro-nucleotide
  misc_feature (2)..(3): /note="phosphorothioate bond"
  modified_base (3)..(3): 2'-OMe-nucleotide
  modified_base (4)..(4): 2'-OMe-nucleotide
  modified_base (5)..(5): 2'-OMe-nucleotide
  modified_base (6)..(6): 2'-fluoro-nucleotide
  modified_base (7)..(7): 2'-OMe-nucleotide
  modified_base (8)..(8): 2'-OMe-nucleotide
  modified_base (9)..(9): 2'-OMe-nucleotide
  modified_base (10)..(10): 2'-OMe-nucleotide
  modified_base (11)..(11): 2'-OMe-nucleotide
  modified_base (12)..(12): 2'-OMe-nucleotide
  modified_base (13)..(13): 2'-OMe-nucleotide
  modified_base (14)..(14): 2'-fluoro-nucleotide
  modified_base (15)..(15): 2'-OMe-nucleotide
  modified_base (16)..(16): 2'-fluoro-nucleotide
  modified_base (17)..(17): 2'-OMe-nucleotide
  modified_base (18)..(18): 2'-OMe-nucleotide
  modified_base (19)..(19): 2'-OMe-nucleotide
  misc_feature (19)..(20): /note="phosphorothioate bond"
  modified_base (20)..(20): 2'-OMe-nucleotide
  misc_feature (20)..(21): /note="phosphorothioate bond"
  modified_base (21)..(21): 2'-OMe-nucleotide
guaugugccuugauaacucaa

SEQ ID NO: 1469 - RNA, 21 nt, Artificial Sequence
  source: /note="Description of Artificial Sequence: Synthetic oligonucleotide"
  modified_base (1)..(1): 2'-OMe-nucleotide
  misc_feature (1)..(2): /note="phosphorothioate bond"
  modified_base (2)..(2): 2'-fluoro-nucleotide
  misc_feature (2)..(3): /note="phosphorothioate bond"
  modified_base (3)..(3): 2'-OMe-nucleotide
  modified_base (4)..(4): 2'-fluoro-nucleotide
  modified_base (5)..(5): 2'-OMe-nucleotide
  modified_base (6)..(6): 2'-OMe-nucleotide
  modified_base (7)..(7): 2'-OMe-nucleotide
  modified_base (8)..(8): 2'-fluoro-nucleotide
  modified_base (9)..(9): 2'-fluoro-nucleotide
  modified_base (10)..(10): 2'-OMe-nucleotide
  modified_base (11)..(11): 2'-OMe-nucleotide
  modified_base (12)..(12): 2'-OMe-nucleotide
  modified_base (13)..(13): 2'-OMe-nucleotide
  modified_base (14)..(14): 2'-fluoro-nucleotide
  modified_base (15)..(15): 2'-OMe-nucleotide
  modified_base (16)..(16): 2'-fluoro-nucleotide
  modified_base (17)..(17): 2'-OMe-nucleotide
  modified_base (18)..(18): 2'-OMe-nucleotide
  modified_base (19)..(19): 2'-OMe-nucleotide
  misc_feature (19)..(20): /note="phosphorothioate bond"
  modified_base (20)..(20): 2'-OMe-nucleotide
  misc_feature (20)..(21): /note="phosphorothioate bond"
  modified_base (21)..(21): 2'-OMe-nucleotide
guaugugccuugauaacucaa

SEQ ID NO: 1470 - RNA, 21 nt, Artificial Sequence
  source: /note="Description of Artificial Sequence: Synthetic oligonucleotide"
  modified_base (1)..(1): 2'-OMe-nucleotide
  misc_feature (1)..(2): /note="phosphorothioate bond"
  modified_base (2)..(2): 2'-fluoro-nucleotide
  misc_feature (2)..(3): /note="phosphorothioate bond"
  modified_base (3)..(3): 2'-OMe-nucleotide
  modified_base (4)..(4): 2'-fluoro-nucleotide
  modified_base (5)..(5): 2'-OMe-nucleotide
  modified_base (6)..(6): 2'-OMe-nucleotide
  modified_base (7)..(7): 2'-OMe-nucleotide
  modified_base (8)..(8): 2'-OMe-nucleotide
  modified_base (9)..(9): 2'-fluoro-nucleotide
  modified_base (10)..(10): 2'-OMe-nucleotide
  modified_base (11)..(11): 2'-OMe-nucleotide
  modified_base (12)..(12): 2'-OMe-nucleotide
  modified_base (13)..(13): 2'-OMe-nucleotide
  modified_base (14)..(14): 2'-fluoro-nucleotide
  modified_base (15)..(15): 2'-OMe-nucleotide
  modified_base (16)..(16): 2'-fluoro-nucleotide
  modified_base (17)..(17): 2'-OMe-nucleotide
  modified_base (18)..(18): 2'-OMe-nucleotide
  modified_base (19)..(19): 2'-OMe-nucleotide
  misc_feature (19)..(20): /note="phosphorothioate bond"
  modified_base (20)..(20): 2'-OMe-nucleotide
  misc_feature (20)..(21): /note="phosphorothioate bond"
  modified_base (21)..(21): 2'-OMe-nucleotide
guaugugccuugauaacucaa

SEQ ID NO: 1471 - DNA, 21 bp, Artificial Sequence
  source: /note="Description of Artificial Sequence: Synthetic oligonucleotide"
  source: /note="Description of Combined DNA/RNA Molecule: Synthetic oligonucleotide"
  modified_base (1)..(1): 2'-fluoro-nucleotide
  misc_feature (1)..(2): /note="phosphorothioate bond"
  modified_base (2)..(2): 2'-fluoro-nucleotide
  misc_feature (2)..(3): /note="phosphorothioate bond"
  modified_base (3)..(3): 2'-OMe-nucleotide
  modified_base (4)..(4): 2'-fluoro-nucleotide
  modified_base (5)..(5): 2'-OMe-nucleotide
  modified_base (6)..(6): 2'-fluoro-nucleotide
  modified_base (7)..(7): 2'-OMe-nucleotide
  modified_base (8)..(8): 2'-fluoro-nucleotide
  modified_base (9)..(9): 2'-OMe-nucleotide
  modified_base (10)..(10): 2'-fluoro-nucleotide
  modified_base (11)..(11): 2'-OMe-nucleotide
  modified_base (12)..(12): 2'-OMe-nucleotide
  modified_base (13)..(13): 2'-OMe-nucleotide
  modified_base (14)..(14): 2'-fluoro-nucleotide
  modified_base (15)..(15): 2'-OMe-nucleotide
  modified_base (16)..(16): 2'-fluoro-nucleotide
  modified_base (17)..(17): 2'-OMe-nucleotide
  modified_base (18)..(18): 2'-fluoro-nucleotide
  modified_base (19)..(19): 2'-OMe-nucleotide
  misc_feature (19)..(20): /note="phosphorothioate bond"
  modified_base (20)..(20): dT
  misc_feature (20)..(21): /note="phosphorothioate bond"
  modified_base (21)..(21): dT
guaugugccuugauaacuctt

SEQ ID NO: 1472 - RNA, 21 nt, Artificial Sequence
  source: /note="Description of Artificial Sequence: Synthetic oligonucleotide"
  modified_base (1)..(1): 2'-OMe-nucleotide
  misc_feature (1)..(2): /note="phosphorothioate bond"
  modified_base (2)..(2): 2'-fluoro-nucleotide
  misc_feature (2)..(3): /note="phosphorothioate bond"
  modified_base (3)..(3): 2'-OMe-nucleotide
  modified_base (4)..(4): 2'-fluoro-nucleotide
  modified_base (5)..(5): 2'-OMe-nucleotide
  modified_base (6)..(6): 2'-OMe-nucleotide
  modified_base (7)..(7): 2'-OMe-nucleotide
  modified_base (8)..(8): 2'-OMe-nucleotide
  modified_base (9)..(9): 2'-OMe-nucleotide
  modified_base (10)..(10): 2'-OMe-nucleotide
  modified_base (11)..(11): 2'-OMe-nucleotide
  modified_base (12)..(12): 2'-OMe-nucleotide
  modified_base (13)..(13): 2'-OMe-nucleotide
  modified_base (14)..(14): 2'-fluoro-nucleotide
  modified_base (15)..(15): 2'-OMe-nucleotide
  modified_base (16)..(16): 2'-fluoro-nucleotide
  modified_base (17)..(17): 2'-OMe-nucleotide
  modified_base (18)..(18): 2'-OMe-nucleotide
  modified_base (19)..(19): 2'-OMe-nucleotide
  misc_feature (19)..(20): /note="phosphorothioate bond"
  modified_base (20)..(20): Locked nucleic acid (LNA) nucleotide
  misc_feature (20)..(21): /note="phosphorothioate bond"
  modified_base (21)..(21): Locked nucleic acid (LNA) nucleotide
guaugugccuugauaacucaa

SEQ ID NO: 1473 - RNA, 21 nt, Artificial Sequence
  source: /note="Description of Artificial Sequence: Synthetic oligonucleotide"
  modified_base (1)..(1): 2'-OMe-nucleotide
  misc_feature (1)..(2): /note="phosphorothioate bond"
  modified_base (2)..(2): 2'-fluoro-nucleotide
  misc_feature (2)..(3): /note="phosphorothioate bond"
  modified_base (3)..(3): 2'-OMe-nucleotide
  modified_base (4)..(4): 2'-OMe-nucleotide
  modified_base (5)..(5): 2'-OMe-nucleotide
  modified_base (6)..(6): 2'-fluoro-nucleotide
  modified_base (7)..(7): 2'-OMe-nucleotide
  modified_base (8)..(8): 2'-OMe-nucleotide
  modified_base (9)..(9): 2'-OMe-nucleotide
  modified_base (10)..(10): 2'-OMe-nucleotide
  modified_base (11)..(11): 2'-OMe-nucleotide
  modified_base (12)..(12): 2'-OMe-nucleotide
  modified_base (13)..(13): 2'-OMe-nucleotide
  modified_base (14)..(14): 2'-fluoro-nucleotide
  modified_base (15)..(15): 2'-OMe-nucleotide
  modified_base (16)..(16): 2'-fluoro-nucleotide
  modified_base (17)..(17): 2'-OMe-nucleotide
  modified_base (18)..(18): 2'-OMe-nucleotide
  modified_base (19)..(19): 2'-OMe-nucleotide
  misc_feature (19)..(20): /note="phosphorothioate bond"
  modified_base (20)..(20): Locked nucleic acid (LNA) nucleotide
  misc_feature (20)..(21): /note="phosphorothioate bond"
  modified_base (21)..(21): Locked nucleic acid (LNA) nucleotide
guaugugccuugauaacucaa

SEQ ID NO: 1474 - RNA, 21 nt, Artificial Sequence
  source: /note="Description of Artificial Sequence: Synthetic oligonucleotide"
  modified_base (1)..(1): 2'-OMe-nucleotide
  misc_feature (1)..(2): /note="phosphorothioate bond"
  modified_base (2)..(2): 2'-fluoro-nucleotide
  misc_feature (2)..(3): /note="phosphorothioate bond"
  modified_base (3)..(3): 2'-OMe-nucleotide
  modified_base (4)..(4): 2'-fluoro-nucleotide
  modified_base (5)..(5): 2'-OMe-nucleotide
  modified_base (6)..(6): 2'-OMe-nucleotide
  modified_base (7)..(7): 2'-OMe-nucleotide
  modified_base (8)..(8): 2'-fluoro-nucleotide
  modified_base (9)..(9): 2'-fluoro-nucleotide
  modified_base (10)..(10): 2'-OMe-nucleotide
  modified_base (11)..(11): 2'-OMe-nucleotide
  modified_base (12)..(12): 2'-OMe-nucleotide
  modified_base (13)..(13): 2'-OMe-nucleotide
  modified_base (14)..(14): 2'-fluoro-nucleotide
  modified_base (15)..(15): 2'-OMe-nucleotide
  modified_base (16)..(16): 2'-fluoro-nucleotide
  modified_base (17)..(17): 2'-OMe-nucleotide
  modified_base (18)..(18): 2'-OMe-nucleotide
  modified_base (19)..(19): 2'-OMe-nucleotide
  misc_feature (19)..(20): /note="phosphorothioate bond"
  modified_base (20)..(20): Locked nucleic acid (LNA) nucleotide
  misc_feature (20)..(21): /note="phosphorothioate bond"
  modified_base (21)..(21): Locked nucleic acid (LNA) nucleotide
guaugugccuugauaacucaa

SEQ ID NO: 1475 - RNA, 21 nt, Artificial Sequence
  source: /note="Description of Artificial Sequence: Synthetic oligonucleotide"
  modified_base (1)..(1): 2'-OMe-nucleotide
  misc_feature (1)..(2): /note="phosphorothioate bond"
  modified_base (2)..(2): 2'-fluoro-nucleotide
  misc_feature (2)..(3): /note="phosphorothioate bond"
  modified_base (3)..(3): 2'-OMe-nucleotide
  modified_base (4)..(4): 2'-fluoro-nucleotide
  modified_base (5)..(5): 2'-OMe-nucleotide
  modified_base (6)..(6): 2'-OMe-nucleotide
  modified_base (7)..(7): 2'-OMe-nucleotide
  modified_base (8)..(8): 2'-OMe-nucleotide
  modified_base (9)..(9): 2'-fluoro-nucleotide
  modified_base (10)..(10): 2'-OMe-nucleotide
  modified_base (11)..(11): 2'-OMe-nucleotide
  modified_base (12)..(12): 2'-OMe-nucleotide
  modified_base (13)..(13): 2'-OMe-nucleotide
  modified_base (14)..(14): 2'-fluoro-nucleotide
  modified_base (15)..(15): 2'-OMe-nucleotide
  modified_base (16)..(16): 2'-fluoro-nucleotide
  modified_base (17)..(17): 2'-OMe-nucleotide
  modified_base (18)..(18): 2'-OMe-nucleotide
  modified_base (19)..(19): 2'-OMe-nucleotide
  misc_feature (19)..(20): /note="phosphorothioate bond"
  modified_base (20)..(20): Locked nucleic acid (LNA) nucleotide
  misc_feature (20)..(21): /note="phosphorothioate bond"
  modified_base (21)..(21): Locked nucleic acid (LNA) nucleotide
guaugugccuugauaacucaa

SEQ ID NO: 1476 - RNA, 21 nt, Artificial Sequence
  source: /note="Description of Artificial Sequence: Synthetic oligonucleotide"
  modified_base (1)..(1): 2'-OMe-nucleotide
  misc_feature (1)..(2): /note="phosphorothioate bond"
  modified_base (2)..(2): 2'-fluoro-nucleotide
  misc_feature (2)..(3): /note="phosphorothioate bond"
  modified_base (3)..(3): 2'-OMe-nucleotide
  modified_base (4)..(4): 2'-fluoro-nucleotide
  modified_base (5)..(5): 2'-OMe-nucleotide
  modified_base (6)..(6): 2'-OMe-nucleotide
  modified_base (7)..(7): 2'-OMe-nucleotide
  modified_base (8)..(8): 2'-OMe-nucleotide
  modified_base (9)..(9): 2'-OMe-nucleotide
  modified_base (10)..(10): 2'-OMe-nucleotide
  modified_base (11)..(11): 2'-OMe-nucleotide
  modified_base (12)..(12): 2'-OMe-nucleotide
  modified_base (13)..(13): 2'-OMe-nucleotide
  modified_base (14)..(14): 2'-fluoro-nucleotide
  modified_base (15)..(15): 2'-OMe-nucleotide
  modified_base (16)..(16): 2'-fluoro-nucleotide
  modified_base (17)..(17): 2'-OMe-nucleotide
  modified_base (18)..(18): 2'-OMe-nucleotide
  modified_base (19)..(19): 2'-OMe-nucleotide
  misc_feature (19)..(20): /note="phosphorothioate bond"
  modified_base (20)..(20): 2'-OMe-nucleotide
  misc_feature (20)..(21): /note="phosphorothioate bond"
  modified_base (21)..(21): 2'-OMe-nucleotide
guaugugccuugauaacucaa

SEQ ID NO: 1477 - RNA, 21 nt, Artificial Sequence
  source: /note="Description of Artificial Sequence: Synthetic oligonucleotide"
  modified_base (1)..(1): 2'-OMe-nucleotide
  misc_feature (1)..(2): /note="phosphorothioate bond"
  modified_base (2)..(2): 2'-fluoro-nucleotide
  misc_feature (2)..(3): /note="phosphorothioate bond"
  modified_base (3)..(3): 2'-OMe-nucleotide
  modified_base (4)..(4): 2'-OMe-nucleotide
  modified_base (5)..(5): 2'-OMe-nucleotide
  modified_base (6)..(6): 2'-fluoro-nucleotide
  modified_base (7)..(7): 2'-OMe-nucleotide
  modified_base (8)..(8): 2'-OMe-nucleotide
  modified_base (9)..(9): 2'-OMe-nucleotide
  modified_base (10)..(10): 2'-OMe-nucleotide
  modified_base (11)..(11): 2'-OMe-nucleotide
  modified_base (12)..(12): 2'-OMe-nucleotide
  modified_base (13)..(13): 2'-OMe-nucleotide
  modified_base (14)..(14): 2'-fluoro-nucleotide
  modified_base (15)..(15): 2'-OMe-nucleotide
  modified_base (16)..(16): 2'-fluoro-nucleotide
  modified_base (17)..(17): 2'-OMe-nucleotide
  modified_base (18)..(18): 2'-OMe-nucleotide
  modified_base (19)..(19): 2'-OMe-nucleotide
  misc_feature (19)..(20): /note="phosphorothioate bond"
  modified_base (20)..(20): 2'-OMe-nucleotide
  misc_feature (20)..(21): /note="phosphorothioate bond"
  modified_base (21)..(21): 2'-OMe-nucleotide
guaugugccuugauaacucaa

SEQ ID NO: 1478 - RNA, 21 nt, Artificial Sequence
  source: /note="Description of Artificial Sequence: Synthetic oligonucleotide"
  modified_base (1)..(1): 2'-OMe-nucleotide
  misc_feature (1)..(2): /note="phosphorothioate bond"
  modified_base (2)..(2): 2'-fluoro-nucleotide
  misc_feature (2)..(3): /note="phosphorothioate bond"
  modified_base (3)..(3): 2'-OMe-nucleotide
  modified_base (4)..(4): 2'-fluoro-nucleotide
  modified_base (5)..(5): 2'-OMe-nucleotide
  modified_base (6)..(6): 2'-OMe-nucleotide
  modified_base (7)..(7): 2'-OMe-nucleotide
  modified_base (8)..(8): 2'-fluoro-nucleotide
  modified_base (9)..(9): 2'-fluoro-nucleotide
  modified_base (10)..(10): 2'-OMe-nucleotide
  modified_base (11)..(11): 2'-OMe-nucleotide
  modified_base (12)..(12): 2'-OMe-nucleotide
  modified_base (13)..(13): 2'-OMe-nucleotide
  modified_base (14)..(14): 2'-fluoro-nucleotide
  modified_base (15)..(15): 2'-OMe-nucleotide
  modified_base (16)..(16): 2'-fluoro-nucleotide
  modified_base (17)..(17): 2'-OMe-nucleotide
  modified_base (18)..(18): 2'-OMe-nucleotide
  modified_base (19)..(19): 2'-OMe-nucleotide
  misc_feature (19)..(20): /note="phosphorothioate bond"
  modified_base (20)..(20): 2'-OMe-nucleotide
  misc_feature (20)..(21): /note="phosphorothioate bond"
  modified_base (21)..(21): 2'-OMe-nucleotide
guaugugccuugauaacucaa

SEQ ID NO: 1479 - RNA, 21 nt, Artificial Sequence
  source: /note="Description of Artificial Sequence: Synthetic oligonucleotide"
  modified_base (1)..(1): 2'-OMe-nucleotide
  misc_feature (1)..(2): /note="phosphorothioate bond"
  modified_base (2)..(2): 2'-fluoro-nucleotide
  misc_feature (2)..(3): /note="phosphorothioate bond"
  modified_base (3)..(3): 2'-OMe-nucleotide
  modified_base (4)..(4): 2'-fluoro-nucleotide
  modified_base (5)..(5): 2'-OMe-nucleotide
  modified_base (6)..(6): 2'-OMe-nucleotide
  modified_base (7)..(7): 2'-OMe-nucleotide
  modified_base (8)..(8): 2'-OMe-nucleotide
  modified_base (9)..(9): 2'-fluoro-nucleotide
  modified_base (10)..(10): 2'-OMe-nucleotide
  modified_base (11)..(11): 2'-OMe-nucleotide
  modified_base (12)..(12): 2'-OMe-nucleotide
  modified_base (13)..(13): 2'-OMe-nucleotide
  modified_base (14)..(14): 2'-fluoro-nucleotide
  modified_base (15)..(15): 2'-OMe-nucleotide
  modified_base (16)..(16): 2'-fluoro-nucleotide
  modified_base (17)..(17): 2'-OMe-nucleotide
  modified_base (18)..(18): 2'-OMe-nucleotide
  modified_base (19)..(19): 2'-OMe-nucleotide
  misc_feature (19)..(20): /note="phosphorothioate bond"
  modified_base (20)..(20): 2'-OMe-nucleotide
  misc_feature (20)..(21): /note="phosphorothioate bond"
  modified_base (21)..(21): 2'-OMe-nucleotide
guaugugccuugauaacucaa

SEQ ID NO: 1480 - DNA, 21 bp, Artificial Sequence
  source: /note="Description of Artificial Sequence: Synthetic oligonucleotide"
  source: /note="Description of Combined DNA/RNA Molecule: Synthetic oligonucleotide"
  modified_base (1)..(1): 2'-fluoro-nucleotide
  misc_feature (1)..(2): /note="phosphorothioate bond"
  modified_base (2)..(2): 2'-fluoro-nucleotide
  misc_feature (2)..(3): /note="phosphorothioate bond"
  modified_base (3)..(3): 2'-OMe-nucleotide
  modified_base (4)..(4): 2'-fluoro-nucleotide
  modified_base (5)..(5): 2'-OMe-nucleotide
  modified_base (6)..(6): 2'-fluoro-nucleotide
  modified_base (7)..(7): 2'-OMe-nucleotide
  modified_base (8)..(8): 2'-fluoro-nucleotide
  modified_base (9)..(9): 2'-OMe-nucleotide
  modified_base (10)..(10): 2'-fluoro-nucleotide
  modified_base (11)..(11): 2'-OMe-nucleotide
  modified_base (12)..(12): 2'-OMe-nucleotide
  modified_base (13)..(13): 2'-OMe-nucleotide
  modified_base (14)..(14): 2'-fluoro-nucleotide
  modified_base (15)..(15): 2'-OMe-nucleotide
  modified_base (16)..(16): 2'-fluoro-nucleotide
  modified_base (17)..(17): 2'-OMe-nucleotide
  modified_base (18)..(18): 2'-fluoro-nucleotide
  modified_base (19)..(19): 2'-OMe-nucleotide
  misc_feature (19)..(20): /note="phosphorothioate bond"
  modified_base (20)..(20): dT
  misc_feature (20)..(21): /note="phosphorothioate bond"
  modified_base (21)..(21): dT
guaugugccuugauaacuctt

SEQ ID NO: 1481 - RNA, 21 nt, Artificial Sequence
  source: /note="Description of Artificial Sequence: Synthetic oligonucleotide"
  modified_base (1)..(1): 2'-OMe-nucleotide
  misc_feature (1)..(2): /note="phosphorothioate bond"
  modified_base (2)..(2): 2'-fluoro-nucleotide
  misc_feature (2)..(3): /note="phosphorothioate bond"
  modified_base (3)..(3): 2'-OMe-nucleotide
  modified_base (4)..(4): 2'-fluoro-nucleotide
  modified_base (5)..(5): 2'-OMe-nucleotide
  modified_base (6)..(6): 2'-OMe-nucleotide
  modified_base (7)..(7): 2'-OMe-nucleotide
  modified_base (8)..(8): 2'-OMe-nucleotide
  modified_base (9)..(9): 2'-OMe-nucleotide
  modified_base (10)..(10): 2'-OMe-nucleotide
  modified_base (11)..(11): 2'-OMe-nucleotide
  modified_base (12)..(12): 2'-OMe-nucleotide
  modified_base (13)..(13): 2'-OMe-nucleotide
  modified_base (14)..(14): 2'-fluoro-nucleotide
  modified_base (15)..(15): 2'-OMe-nucleotide
  modified_base (16)..(16): 2'-fluoro-nucleotide
  modified_base (17)..(17): 2'-OMe-nucleotide
  modified_base (18)..(18): 2'-OMe-nucleotide
  modified_base (19)..(19): 2'-OMe-nucleotide
  misc_feature (19)..(20): /note="phosphorothioate bond"
  modified_base (20)..(20): Locked nucleic acid (LNA) nucleotide
  misc_feature (20)..(21): /note="phosphorothioate bond"
  modified_base (21)..(21): Locked nucleic acid (LNA) nucleotide
guaugugccuugauaacucaa

SEQ ID NO: 1482 - RNA, 21 nt, Artificial Sequence
  source: /note="Description of Artificial Sequence: Synthetic oligonucleotide"
  modified_base (1)..(1): 2'-OMe-nucleotide
  misc_feature (1)..(2): /note="phosphorothioate bond"
  modified_base (2)..(2): 2'-fluoro-nucleotide
  misc_feature (2)..(3): /note="phosphorothioate bond"
  modified_base (3)..(3): 2'-OMe-nucleotide
  modified_base (4)..(4): 2'-OMe-nucleotide
  modified_base (5)..(5): 2'-OMe-nucleotide
  modified_base (6)..(6): 2'-fluoro-nucleotide
  modified_base (7)..(7): 2'-OMe-nucleotide
  modified_base (8)..(8): 2'-OMe-nucleotide
  modified_base (9)..(9): 2'-OMe-nucleotide
  modified_base (10)..(10): 2'-OMe-nucleotide
  modified_base (11)..(11): 2'-OMe-nucleotide
  modified_base (12)..(12): 2'-OMe-nucleotide
  modified_base (13)..(13): 2'-OMe-nucleotide
  modified_base (14)..(14): 2'-fluoro-nucleotide
  modified_base (15)..(15): 2'-OMe-nucleotide
  modified_base (16)..(16): 2'-fluoro-nucleotide
  modified_base (17)..(17): 2'-OMe-nucleotide
  modified_base (18)..(18): 2'-OMe-nucleotide
  modified_base (19)..(19): 2'-OMe-nucleotide
  misc_feature (19)..(20): /note="phosphorothioate bond"
  modified_base (20)..(20): Locked nucleic acid (LNA) nucleotide
  misc_feature (20)..(21): /note="phosphorothioate bond"
  modified_base (21)..(21): Locked nucleic acid (LNA) nucleotide
guaugugccuugauaacucaa

SEQ ID NO: 1483 - RNA, 21 nt, Artificial Sequence
  source: /note="Description of Artificial Sequence: Synthetic oligonucleotide"
  modified_base (1)..(1): 2'-OMe-nucleotide
  misc_feature (1)..(2): /note="phosphorothioate bond"
  modified_base (2)..(2): 2'-fluoro-nucleotide
  misc_feature (2)..(3): /note="phosphorothioate bond"
  modified_base (3)..(3): 2'-OMe-nucleotide
  modified_base (4)..(4): 2'-fluoro-nucleotide
  modified_base (5)..(5): 2'-OMe-nucleotide
  modified_base (6)..(6): 2'-OMe-nucleotide
  modified_base (7)..(7): 2'-OMe-nucleotide
  modified_base (8)..(8): 2'-fluoro-nucleotide
  modified_base (9)..(9): 2'-fluoro-nucleotide
  modified_base (10)..(10): 2'-OMe-nucleotide
  modified_base (11)..(11): 2'-OMe-nucleotide
  modified_base (12)..(12): 2'-OMe-nucleotide
  modified_base (13)..(13): 2'-OMe-nucleotide
  modified_base (14)..(14): 2'-fluoro-nucleotide
  modified_base (15)..(15): 2'-OMe-nucleotide
  modified_base (16)..(16): 2'-fluoro-nucleotide
  modified_base (17)..(17): 2'-OMe-nucleotide
  modified_base (18)..(18): 2'-OMe-nucleotide
  modified_base (19)..(19): 2'-OMe-nucleotide
  misc_feature (19)..(20): /note="phosphorothioate bond"
  modified_base (20)..(20): Locked nucleic acid (LNA) nucleotide
  misc_feature (20)..(21): /note="phosphorothioate bond"
  modified_base (21)..(21): Locked nucleic acid (LNA) nucleotide
guaugugccuugauaacucaa

SEQ ID NO: 1484 - RNA, 21 nt, Artificial Sequence
  source: /note="Description of Artificial Sequence: Synthetic oligonucleotide"
  modified_base (1)..(1): 2'-OMe-nucleotide
  misc_feature (1)..(2): /note="phosphorothioate bond"
  modified_base (2)..(2): 2'-fluoro-nucleotide
  misc_feature (2)..(3): /note="phosphorothioate bond"
  modified_base (3)..(3): 2'-OMe-nucleotide
  modified_base (4)..(4): 2'-fluoro-nucleotide
  modified_base (5)..(5): 2'-OMe-nucleotide
  modified_base (6)..(6): 2'-OMe-nucleotide
  modified_base (7)..(7): 2'-OMe-nucleotide
  modified_base (8)..(8): 2'-OMe-nucleotide
  modified_base (9)..(9): 2'-fluoro-nucleotide
  modified_base (10)..(10): 2'-OMe-nucleotide
  modified_base (11)..(11): 2'-OMe-nucleotide
  modified_base (12)..(12): 2'-OMe-nucleotide
  modified_base (13)..(13): 2'-OMe-nucleotide
  modified_base (14)..(14): 2'-fluoro-nucleotide
  modified_base (15)..(15): 2'-OMe-nucleotide
  modified_base (16)..(16): 2'-fluoro-nucleotide
  modified_base (17)..(17): 2'-OMe-nucleotide
  modified_base (18)..(18): 2'-OMe-nucleotide
  modified_base (19)..(19): 2'-OMe-nucleotide
  misc_feature (19)..(20): /note="phosphorothioate bond"
  modified_base (20)..(20): Locked nucleic acid (LNA) nucleotide
  misc_feature (20)..(21): /note="phosphorothioate bond"
  modified_base (21)..(21): Locked nucleic acid (LNA) nucleotide
guaugugccuugauaacucaa

SEQ ID NO: 1485 - RNA, 21 nt, Artificial Sequence
  source: /note="Description of Artificial Sequence: Synthetic oligonucleotide"
  modified_base (1)..(1): 2'-OMe-nucleotide
  misc_feature (1)..(2): /note="phosphorothioate bond"
  modified_base (2)..(2): 2'-fluoro-nucleotide
  misc_feature (2)..(3): /note="phosphorothioate bond"
  modified_base (3)..(3): 2'-OMe-nucleotide
  modified_base (4)..(4): 2'-fluoro-nucleotide
  modified_base (5)..(5): 2'-OMe-nucleotide
  modified_base (6)..(6): 2'-OMe-nucleotide
  modified_base (7)..(7): 2'-OMe-nucleotide
  modified_base (8)..(8): 2'-OMe-nucleotide
  modified_base (9)..(9): 2'-OMe-nucleotide
  modified_base (10)..(10): 2'-OMe-nucleotide
  modified_base (11)..(11): 2'-OMe-nucleotide
  modified_base (12)..(12): 2'-OMe-nucleotide
  modified_base (13)..(13): 2'-OMe-nucleotide
  modified_base (14)..(14): 2'-fluoro-nucleotide
  modified_base (15)..(15): 2'-OMe-nucleotide
  modified_base (16)..(16): 2'-fluoro-nucleotide
  modified_base (17)..(17): 2'-OMe-nucleotide
  modified_base (18)..(18): 2'-OMe-nucleotide
  modified_base (19)..(19): 2'-OMe-nucleotide
  misc_feature (19)..(20): /note="phosphorothioate bond"
  modified_base (20)..(20): 2'-OMe-nucleotide
  misc_feature (20)..(21): /note="phosphorothioate bond"
  modified_base (21)..(21): 2'-OMe-nucleotide
guaugugccuugauaacucaa

SEQ ID NO: 1486 - RNA, 21 nt, Artificial Sequence
  source: /note="Description of Artificial Sequence: Synthetic oligonucleotide"
  modified_base (1)..(1): 2'-OMe-nucleotide
  misc_feature (1)..(2): /note="phosphorothioate bond"
  modified_base (2)..(2): 2'-fluoro-nucleotide
  misc_feature (2)..(3): /note="phosphorothioate bond"
  modified_base (3)..(3): 2'-OMe-nucleotide
  modified_base (4)..(4): 2'-OMe-nucleotide
  modified_base (5)..(5): 2'-OMe-nucleotide
  modified_base (6)..(6): 2'-fluoro-nucleotide
  modified_base (7)..(7): 2'-OMe-nucleotide
  modified_base (8)..(8): 2'-OMe-nucleotide
  modified_base (9)..(9): 2'-OMe-nucleotide
  modified_base (10)..(10): 2'-OMe-nucleotide
  modified_base (11)..(11): 2'-OMe-nucleotide
  modified_base (12)..(12): 2'-OMe-nucleotide
  modified_base (13)..(13): 2'-OMe-nucleotide
  modified_base (14)..(14): 2'-fluoro-nucleotide
  modified_base (15)..(15): 2'-OMe-nucleotide
  modified_base (16)..(16): 2'-fluoro-nucleotide
  modified_base (17)..(17): 2'-OMe-nucleotide
  modified_base (18)..(18): 2'-OMe-nucleotide
  modified_base (19)..(19): 2'-OMe-nucleotide
  misc_feature (19)..(20): /note="phosphorothioate bond"
  modified_base (20)..(20): 2'-OMe-nucleotide
  misc_feature (20)..(21): /note="phosphorothioate bond"
  modified_base (21)..(21): 2'-OMe-nucleotide
guaugugccuugauaacucaa

SEQ ID NO: 1487 - RNA, 21 nt, Artificial Sequence
  source: /note="Description of Artificial Sequence: Synthetic oligonucleotide"
  modified_base (1)..(1): 2'-OMe-nucleotide
  misc_feature (1)..(2): /note="phosphorothioate bond"
  modified_base (2)..(2): 2'-fluoro-nucleotide
  misc_feature (2)..(3): /note="phosphorothioate bond"
  modified_base (3)..(3): 2'-OMe-nucleotide
  modified_base (4)..(4): 2'-fluoro-nucleotide
  modified_base (5)..(5): 2'-OMe-nucleotide
  modified_base (6)..(6): 2'-OMe-nucleotide
  modified_base (7)..(7): 2'-OMe-nucleotide
  modified_base (8)..(8): 2'-fluoro-nucleotide
  modified_base (9)..(9): 2'-fluoro-nucleotide
  modified_base (10)..(10): 2'-OMe-nucleotide
  modified_base (11)..(11): 2'-OMe-nucleotide
  modified_base (12)..(12): 2'-OMe-nucleotide
  modified_base (13)..(13): 2'-OMe-nucleotide
  modified_base (14)..(14): 2'-fluoro-nucleotide
  modified_base (15)..(15): 2'-OMe-nucleotide
  modified_base (16)..(16): 2'-fluoro-nucleotide
  modified_base (17)..(17): 2'-OMe-nucleotide
  modified_base (18)..(18): 2'-OMe-nucleotide
  modified_base (19)..(19): 2'-OMe-nucleotide
  misc_feature (19)..(20): /note="phosphorothioate bond"
  modified_base (20)..(20): 2'-OMe-nucleotide
  misc_feature (20)..(21): /note="phosphorothioate bond"
  modified_base (21)..(21): 2'-OMe-nucleotide
guaugugccuugauaacucaa

SEQ ID NO: 1488 - RNA, 21 nt, Artificial Sequence
  source: /note="Description of Artificial Sequence: Synthetic oligonucleotide"
  modified_base (1)..(1): 2'-OMe-nucleotide
  misc_feature (1)..(2): /note="phosphorothioate bond"
  modified_base (2)..(2): 2'-fluoro-nucleotide
  misc_feature (2)..(3): /note="phosphorothioate bond"
  modified_base (3)..(3): 2'-OMe-nucleotide
  modified_base (4)..(4): 2'-fluoro-nucleotide
  modified_base (5)..(5): 2'-OMe-nucleotide
  modified_base (6)..(6): 2'-OMe-nucleotide
  modified_base (7)..(7): 2'-OMe-nucleotide
  modified_base (8)..(8): 2'-OMe-nucleotide
  modified_base (9)..(9): 2'-fluoro-nucleotide
  modified_base (10)..(10): 2'-OMe-nucleotide
  modified_base (11)..(11): 2'-OMe-nucleotide
  modified_base (12)..(12): 2'-OMe-nucleotide
  modified_base (13)..(13): 2'-OMe-nucleotide
  modified_base (14)..(14): 2'-fluoro-nucleotide
  modified_base (15)..(15): 2'-OMe-nucleotide
  modified_base (16)..(16): 2'-fluoro-nucleotide
  modified_base (17)..(17): 2'-OMe-nucleotide
  modified_base (18)..(18): 2'-OMe-nucleotide
  modified_base (19)..(19): 2'-OMe-nucleotide
  misc_feature (19)..(20): /note="phosphorothioate bond"
  modified_base (20)..(20): 2'-OMe-nucleotide
  misc_feature (20)..(21): /note="phosphorothioate bond"
  modified_base (21)..(21): 2'-OMe-nucleotide
guaugugccuugauaacucaa

SEQ ID NO: 1489 - DNA, 21 bp, Artificial Sequence
  source: /note="Description of Artificial Sequence: Synthetic oligonucleotide"
  source: /note="Description of Combined DNA/RNA Molecule: Synthetic oligonucleotide"
  modified_base (1)..(1): 2'-fluoro-nucleotide
  misc_feature (1)..(2): /note="phosphorothioate bond"
  modified_base (2)..(2): 2'-fluoro-nucleotide
  misc_feature (2)..(3): /note="phosphorothioate bond"
  modified_base (3)..(3): 2'-OMe-nucleotide
  modified_base (4)..(4): 2'-fluoro-nucleotide
  modified_base (5)..(5): 2'-OMe-nucleotide
  modified_base (6)..(6): 2'-fluoro-nucleotide
  modified_base (7)..(7): 2'-OMe-nucleotide
  modified_base (8)..(8): 2'-fluoro-nucleotide
  modified_base (9)..(9): 2'-OMe-nucleotide
  modified_base (10)..(10): 2'-fluoro-nucleotide
  modified_base (11)..(11): 2'-OMe-nucleotide
  modified_base (12)..(12): 2'-OMe-nucleotide
  modified_base (13)..(13): 2'-OMe-nucleotide
  modified_base (14)..(14): 2'-fluoro-nucleotide
  modified_base (15)..(15): 2'-OMe-nucleotide
  modified_base (16)..(16): 2'-fluoro-nucleotide
  modified_base (17)..(17): 2'-OMe-nucleotide
  modified_base (18)..(18): 2'-fluoro-nucleotide
  modified_base (19)..(19): 2'-OMe-nucleotide
  misc_feature (19)..(20): /note="phosphorothioate bond"
  modified_base (20)..(20): dT
  misc_feature (20)..(21): /note="phosphorothioate bond"
  modified_base (21)..(21): dT
guaugugccuugauaacuctt

SEQ ID NO: 1490 - RNA, 21 nt, Artificial Sequence
  source: /note="Description of Artificial Sequence: Synthetic oligonucleotide"
  modified_base (1)..(1): 2'-OMe-nucleotide
  misc_feature (1)..(2): /note="phosphorothioate bond"
  modified_base (2)..(2): 2'-fluoro-nucleotide
  misc_feature (2)..(3): /note="phosphorothioate bond"
  modified_base (3)..(3): 2'-OMe-nucleotide
  modified_base (4)..(4): 2'-fluoro-nucleotide
  modified_base (5)..(5): 2'-OMe-nucleotide
  modified_base (6)..(6): 2'-OMe-nucleotide
  modified_base (7)..(7): 2'-OMe-nucleotide
  modified_base (8)..(8): 2'-OMe-nucleotide
  modified_base (9)..(9): 2'-OMe-nucleotide
  modified_base (10)..(10): 2'-OMe-nucleotide
  modified_base (11)..(11): 2'-OMe-nucleotide
  modified_base (12)..(12): 2'-OMe-nucleotide
  modified_base (13)..(13): 2'-OMe-nucleotide
  modified_base (14)..(14): 2'-fluoro-nucleotide
  modified_base (15)..(15): 2'-OMe-nucleotide
  modified_base (16)..(16): 2'-fluoro-nucleotide
  modified_base (17)..(17): 2'-OMe-nucleotide
  modified_base (18)..(18): 2'-OMe-nucleotide
  modified_base (19)..(19): 2'-OMe-nucleotide
  misc_feature (19)..(20): /note="phosphorothioate bond"
  modified_base (20)..(20): 2'-OMe-nucleotide
  misc_feature (20)..(21): /note="phosphorothioate bond"
  modified_base (21)..(21): 2'-OMe-nucleotide
guaugugccuugauaacucaa

SEQ ID NO: 1491 - RNA, 21 nt, Artificial Sequence
  source: /note="Description of Artificial Sequence: Synthetic oligonucleotide"
  modified_base (1)..(1): 2'-OMe-nucleotide
  misc_feature (1)..(2): /note="phosphorothioate bond"
  modified_base (2)..(2): 2'-fluoro-nucleotide
  misc_feature (2)..(3): /note="phosphorothioate bond"
  modified_base (3)..(3): 2'-OMe-nucleotide
  modified_base (4)..(4): 2'-OMe-nucleotide
  modified_base (5)..(5): 2'-OMe-nucleotide
  modified_base (6)..(6): 2'-fluoro-nucleotide
  modified_base (7)..(7): 2'-OMe-nucleotide
  modified_base (8)..(8): 2'-OMe-nucleotide
  modified_base (9)..(9): 2'-OMe-nucleotide
  modified_base (10)..(10): 2'-OMe-nucleotide
  modified_base (11)..(11): 2'-OMe-nucleotide
  modified_base (12)..(12): 2'-OMe-nucleotide
  modified_base (13)..(13): 2'-OMe-nucleotide
  modified_base (14)..(14): 2'-fluoro-nucleotide
  modified_base (15)..(15): 2'-OMe-nucleotide
  modified_base (16)..(16): 2'-fluoro-nucleotide
  modified_base (17)..(17): 2'-OMe-nucleotide
  modified_base (18)..(18): 2'-OMe-nucleotide
  modified_base (19)..(19): 2'-OMe-nucleotide
  misc_feature (19)..(20): /note="phosphorothioate bond"
  modified_base (20)..(20): 2'-OMe-nucleotide
  misc_feature (20)..(21): /note="phosphorothioate bond"
  modified_base (21)..(21): 2'-OMe-nucleotide
guaugugccuugauaacucaa

SEQ ID NO: 1492 - RNA, 21 nt, Artificial Sequence
  source: /note="Description of Artificial Sequence: Synthetic oligonucleotide"
  modified_base (1)..(1): 2'-OMe-nucleotide
  misc_feature (1)..(2): /note="phosphorothioate bond"
  modified_base (2)..(2): 2'-fluoro-nucleotide
  misc_feature (2)..(3): /note="phosphorothioate bond"
  modified_base (3)..(3): 2'-OMe-nucleotide
  modified_base (4)..(4): 2'-fluoro-nucleotide
  modified_base (5)..(5): 2'-OMe-nucleotide
  modified_base (6)..(6): 2'-OMe-nucleotide
  modified_base (7)..(7): 2'-OMe-nucleotide
  modified_base (8)..(8): 2'-fluoro-nucleotide
  modified_base (9)..(9): 2'-fluoro-nucleotide
  modified_base (10)..(10): 2'-OMe-nucleotide
  modified_base (11)..(11): 2'-OMe-nucleotide
  modified_base (12)..(12): 2'-OMe-nucleotide
  modified_base (13)..(13): 2'-OMe-nucleotide
  modified_base (14)..(14): 2'-fluoro-nucleotide
  modified_base (15)..(15): 2'-OMe-nucleotide
  modified_base (16)..(16): 2'-fluoro-nucleotide
  modified_base (17)..(17): 2'-OMe-nucleotide
  modified_base (18)..(18): 2'-OMe-nucleotide
  modified_base (19)..(19): 2'-OMe-nucleotide
  misc_feature (19)..(20): /note="phosphorothioate bond"
  modified_base (20)..(20): 2'-OMe-nucleotide
  misc_feature (20)..(21): /note="phosphorothioate bond"
  modified_base (21)..(21): 2'-OMe-nucleotide
guaugugccuugauaacucaa

SEQ ID NO: 1493 - RNA, 21 nt, Artificial Sequence
  source: /note="Description of Artificial Sequence: Synthetic oligonucleotide"
  modified_base (1)..(1): 2'-OMe-nucleotide
  misc_feature (1)..(2): /note="phosphorothioate bond"
  modified_base (2)..(2): 2'-fluoro-nucleotide
  misc_feature (2)..(3): /note="phosphorothioate bond"
  modified_base (3)..(3): 2'-OMe-nucleotide
  modified_base (4)..(4): 2'-fluoro-nucleotide
  modified_base (5)..(5): 2'-OMe-nucleotide
  modified_base (6)..(6): 2'-OMe-nucleotide
  modified_base (7)..(7): 2'-OMe-nucleotide
  modified_base (8)..(8): 2'-OMe-nucleotide
  modified_base (9)..(9): 2'-fluoro-nucleotide
  modified_base (10)..(10): 2'-OMe-nucleotide
  modified_base (11)..(11): 2'-OMe-nucleotide
  modified_base (12)..(12): 2'-OMe-nucleotide
  modified_base (13)..(13): 2'-OMe-nucleotide
  modified_base (14)..(14): 2'-fluoro-nucleotide
  modified_base (15)..(15): 2'-OMe-nucleotide
  modified_base (16)..(16): 2'-fluoro-nucleotide
  modified_base (17)..(17): 2'-OMe-nucleotide
  modified_base (18)..(18): 2'-OMe-nucleotide
  modified_base (19)..(19): 2'-OMe-nucleotide
  misc_feature (19)..(20): /note="phosphorothioate bond"
  modified_base (20)..(20): 2'-OMe-nucleotide
  misc_feature (20)..(21): /note="phosphorothioate bond"
  modified_base (21)..(21): 2'-OMe-nucleotide
guaugugccuugauaacucaa

SEQ ID NO: 1494 - DNA, 21 bp, Artificial Sequence
  source: /note="Description of Artificial Sequence: Synthetic oligonucleotide"
  source: /note="Description of Combined DNA/RNA Molecule: Synthetic oligonucleotide"
  modified_base (1)..(1): 2'-fluoro-nucleotide
  misc_feature (1)..(2): /note="phosphorothioate bond"
  modified_base (2)..(2): 2'-fluoro-nucleotide
  misc_feature (2)..(3): /note="phosphorothioate bond"
  modified_base (3)..(3): 2'-OMe-nucleotide
  modified_base (4)..(4): 2'-fluoro-nucleotide
  modified_base (5)..(5): 2'-OMe-nucleotide
  modified_base (6)..(6): 2'-fluoro-nucleotide
  modified_base (7)..(7): 2'-OMe-nucleotide
  modified_base (8)..(8): 2'-fluoro-nucleotide
  modified_base (9)..(9): 2'-OMe-nucleotide
  modified_base (10)..(10): 2'-fluoro-nucleotide
  modified_base (11)..(11): 2'-OMe-nucleotide
  modified_base (12)..(12): 2'-OMe-nucleotide
  modified_base (13)..(13): 2'-OMe-nucleotide
  modified_base (14)..(14): 2'-fluoro-nucleotide
  modified_base (15)..(15): 2'-OMe-nucleotide
  modified_base (16)..(16): 2'-fluoro-nucleotide
  modified_base (17)..(17): 2'-OMe-nucleotide
  modified_base (18)..(18): 2'-fluoro-nucleotide
  modified_base (19)..(19): 2'-OMe-nucleotide
  misc_feature (19)..(20): /note="phosphorothioate bond"
  modified_base (20)..(20): dT
  misc_feature (20)..(21): /note="phosphorothioate bond"
  modified_base (21)..(21): dT
guaugugccuugauaacuctt

SEQ ID NO: 1495 - RNA, 21 nt, Artificial Sequence
  source: /note="Description of Artificial Sequence: Synthetic oligonucleotide"
  modified_base (1)..(1): 2'-OMe-nucleotide
  misc_feature (1)..(2): /note="phosphorothioate bond"
  modified_base (2)..(2): 2'-fluoro-nucleotide
  misc_feature (2)..(3): /note="phosphorothioate bond"
  modified_base (3)..(3): 2'-OMe-nucleotide
  modified_base (4)..(4): 2'-fluoro-nucleotide
  modified_base (5)..(5): 2'-OMe-nucleotide
  modified_base (6)..(6): 2'-OMe-nucleotide
  modified_base (7)..(7): 2'-OMe-nucleotide
  modified_base (8)..(8): 2'-OMe-nucleotide
  modified_base (9)..(9): 2'-OMe-nucleotide
  modified_base (10)..(10): 2'-OMe-nucleotide
  modified_base (11)..(11): 2'-OMe-nucleotide
  modified_base (12)..(12): 2'-OMe-nucleotide
  modified_base (13)..(13): 2'-OMe-nucleotide
  modified_base (14)..(14): 2'-fluoro-nucleotide
  modified_base (15)..(15): 2'-OMe-nucleotide
  modified_base (16)..(16): 2'-fluoro-nucleotide
  modified_base (17)..(17): 2'-OMe-nucleotide
  modified_base (18)..(18): 2'-OMe-nucleotide
  modified_base (19)..(19): 2'-OMe-nucleotide
  misc_feature (19)..(20): /note="phosphorothioate bond"
  modified_base (20)..(20): 2'-OMe-nucleotide
  misc_feature (20)..(21): /note="phosphorothioate bond"
  modified_base (21)..(21): 2'-OMe-nucleotide
ugccucgauaacuccguccaa

SEQ ID NO: 1496 - RNA, 21 nt, Artificial Sequence
  source: /note="Description of Artificial Sequence: Synthetic oligonucleotide"
  modified_base (1)..(1): 2'-OMe-nucleotide
  misc_feature (1)..(2): /note="phosphorothioate bond"
  modified_base (2)..(2): 2'-fluoro-nucleotide
  misc_feature (2)..(3): /note="phosphorothioate bond"
  modified_base (3)..(3): 2'-OMe-nucleotide
  modified_base (4)..(4): 2'-OMe-nucleotide
  modified_base (5)..(5): 2'-OMe-nucleotide
  modified_base (6)..(6): 2'-fluoro-nucleotide
  modified_base (7)..(7): 2'-OMe-nucleotide
  modified_base (8)..(8): 2'-OMe-nucleotide
  modified_base (9)..(9): 2'-OMe-nucleotide
  modified_base (10)..(10): 2'-OMe-nucleotide
  modified_base (11)..(11): 2'-OMe-nucleotide
  modified_base (12)..(12): 2'-OMe-nucleotide
  modified_base (13)..(13): 2'-OMe-nucleotide
  modified_base (14)..(14): 2'-fluoro-nucleotide
  modified_base (15)..(15): 2'-OMe-nucleotide
  modified_base (16)..(16): 2'-fluoro-nucleotide
  modified_base (17)..(17): 2'-OMe-nucleotide
  modified_base (18)..(18): 2'-OMe-nucleotide
  modified_base (19)..(19): 2'-OMe-nucleotide
  misc_feature (19)..(20): /note="phosphorothioate bond"
  modified_base (20)..(20): 2'-OMe-nucleotide
  misc_feature (20)..(21): /note="phosphorothioate bond"
  modified_base (21)..(21): 2'-OMe-nucleotide
ugccucgauaacuccguccaa

SEQ ID NO: 1497 - RNA, 21 nt, Artificial Sequence
  source: /note="Description of Artificial Sequence: Synthetic oligonucleotide"
  source: /note="N-term hydroxyl group"
  modified_base (1)..(1): 2'-OMe-nucleotide
  misc_feature (1)..(2): /note="phosphorothioate bond"
  modified_base (2)..(2): 2'-fluoro-nucleotide
  misc_feature (2)..(3): /note="phosphorothioate bond"
  modified_base (3)..(3): 2'-OMe-nucleotide
  modified_base (4)..(4): 2'-fluoro-nucleotide
  modified_base (5)..(5): 2'-OMe-nucleotide
  modified_base (6)..(6): 2'-OMe-nucleotide
  modified_base (7)..(7): 2'-OMe-nucleotide
  modified_base (8)..(8): 2'-fluoro-nucleotide
  modified_base (9)..(9): 2'-fluoro-nucleotide
  modified_base (10)..(10): 2'-OMe-nucleotide
  modified_base (11)..(11): 2'-OMe-nucleotide
  modified_base (12)..(12): 2'-OMe-nucleotide
  modified_base (13)..(13): 2'-OMe-nucleotide
  modified_base (14)..(14): 2'-fluoro-nucleotide
  modified_base (15)..(15): 2'-OMe-nucleotide
  modified_base (16)..(16): 2'-fluoro-nucleotide
  modified_base (17)..(17): 2'-OMe-nucleotide
  modified_base (18)..(18): 2'-OMe-nucleotide
  modified_base (19)..(19): 2'-OMe-nucleotide
  misc_feature (19)..(20): /note="phosphorothioate bond"
  modified_base (20)..(20): 2'-OMe-nucleotide
  misc_feature (20)..(21): /note="phosphorothioate bond"
  modified_base (21)..(21): 2'-OMe-nucleotide
ugccucgauaacuccguccaa

SEQ ID NO: 1498 - RNA, 21 nt, Artificial Sequence
  source: /note="Description of Artificial Sequence: Synthetic oligonucleotide"
  modified_base (1)..(1): 2'-OMe-nucleotide
  misc_feature (1)..(2): /note="phosphorothioate bond"
  modified_base (2)..(2): 2'-fluoro-nucleotide
  misc_feature (2)..(3): /note="phosphorothioate bond"
  modified_base (3)..(3): 2'-OMe-nucleotide
  modified_base (4)..(4): 2'-fluoro-nucleotide
  modified_base (5)..(5): 2'-OMe-nucleotide
  modified_base (6)..(6): 2'-OMe-nucleotide
  modified_base (7)..(7): 2'-OMe-nucleotide
  modified_base (8)..(8): 2'-OMe-nucleotide
  modified_base (9)..(9): 2'-fluoro-nucleotide
  modified_base (10)..(10): 2'-OMe-nucleotide
  modified_base (11)..(11): 2'-OMe-nucleotide
  modified_base (12)..(12): 2'-OMe-nucleotide
  modified_base (13)..(13): 2'-OMe-nucleotide
  modified_base (14)..(14): 2'-fluoro-nucleotide
  modified_base (15)..(15): 2'-OMe-nucleotide
  modified_base (16)..(16): 2'-fluoro-nucleotide
  modified_base (17)..(17): 2'-OMe-nucleotide
  modified_base (18)..(18): 2'-OMe-nucleotide
  modified_base (19)..(19): 2'-OMe-nucleotide
  misc_feature (19)..(20): /note="phosphorothioate bond"
  modified_base (20)..(20): 2'-OMe-nucleotide
  misc_feature (20)..(21): /note="phosphorothioate bond"
  modified_base (21)..(21): 2'-OMe-nucleotide
ugccucgauaacuccguccaa

SEQ ID NO: 1499 - DNA, 21 bp, Artificial Sequence
  source: /note="Description of Artificial Sequence: Synthetic oligonucleotide"
  source: /note="Description of Combined DNA/RNA Molecule: Synthetic oligonucleotide"
  modified_base (1)..(1): 2'-fluoro-nucleotide
  misc_feature (1)..(2): /note="phosphorothioate bond"
  modified_base (2)..(2): 2'-fluoro-nucleotide
  misc_feature (2)..(3): /note="phosphorothioate bond"
  modified_base (3)..(3): 2'-OMe-nucleotide
  modified_base (4)..(4): 2'-fluoro-nucleotide
  modified_base (5)..(5): 2'-OMe-nucleotide
  modified_base (6)..(6): 2'-fluoro-nucleotide
  modified_base (7)..(7): 2'-OMe-nucleotide
  modified_base (8)..(8): 2'-fluoro-nucleotide
  modified_base (9)..(9): 2'-OMe-nucleotide
  modified_base (10)..(10): 2'-fluoro-nucleotide
  modified_base (11)..(11): 2'-OMe-nucleotide
  modified_base (12)..(12): 2'-OMe-nucleotide
  modified_base (13)..(13): 2'-OMe-nucleotide
  modified_base (14)..(14): 2'-fluoro-nucleotide
  modified_base (15)..(15): 2'-OMe-nucleotide
  modified_base (16)..(16): 2'-fluoro-nucleotide
  modified_base (17)..(17): 2'-OMe-nucleotide
  modified_base (18)..(18): 2'-fluoro-nucleotide
  modified_base (19)..(19): 2'-OMe-nucleotide
  misc_feature (19)..(20): /note="phosphorothioate bond"
  modified_base (20)..(20): dT
  misc_feature (20)..(21): /note="phosphorothioate bond"
  modified_base (21)..(21): dT
ugccucgauaacuccgucctt

SEQ ID NO: 1500 - RNA, 21 nt, Artificial Sequence
  source: /note="Description of Artificial Sequence: Synthetic oligonucleotide"
  modified_base (1)..(1): 2'-OMe-nucleotide
  misc_feature (1)..(2): /note="phosphorothioate bond"
  modified_base (2)..(2): 2'-fluoro-nucleotide
  misc_feature (2)..(3): /note="phosphorothioate bond"
  modified_base (3)..(3): 2'-OMe-nucleotide
  modified_base (4)..(4): 2'-fluoro-nucleotide
  modified_base (5)..(5): 2'-OMe-nucleotide
  modified_base (6)..(6): 2'-OMe-nucleotide
  modified_base (7)..(7): 2'-OMe-nucleotide
  modified_base (8)..(8): 2'-OMe-nucleotide
  modified_base (9)..(9): 2'-OMe-nucleotide
  modified_base (10)..(10): 2'-OMe-nucleotide
  modified_base (11)..(11): 2'-OMe-nucleotide
  modified_base (12)..(12): 2'-OMe-nucleotide
  modified_base (13)..(13): 2'-OMe-nucleotide
  modified_base (14)..(14): 2'-fluoro-nucleotide
  modified_base (15)..(15): 2'-OMe-nucleotide
  modified_base (16)..(16): 2'-fluoro-nucleotide
  modified_base (17)..(17): 2'-OMe-nucleotide
  modified_base (18)..(18): 2'-OMe-nucleotide
  modified_base (19)..(19): 2'-OMe-nucleotide
  misc_feature (19)..(20): /note="phosphorothioate bond"
  modified_base (20)..(20): 2'-OMe-nucleotide
  misc_feature (20)..(21): /note="phosphorothioate bond"
  modified_base (21)..(21): 2'-OMe-nucleotide
ugccucgauaacuccguccaa

SEQ ID NO: 1501 - RNA, 21 nt, Artificial Sequence
  source: /note="Description of Artificial Sequence: Synthetic oligonucleotide"
  modified_base (1)..(1): 2'-OMe-nucleotide
  misc_feature (1)..(2): /note="phosphorothioate bond"
  modified_base (2)..(2): 2'-fluoro-nucleotide
  misc_feature (2)..(3): /note="phosphorothioate bond"
  modified_base (3)..(3): 2'-OMe-nucleotide
  modified_base (4)..(4): 2'-OMe-nucleotide
  modified_base (5)..(5): 2'-OMe-nucleotide
  modified_base (6)..(6): 2'-fluoro-nucleotide
  modified_base (7)..(7): 2'-OMe-nucleotide
  modified_base (8)..(8): 2'-OMe-nucleotide
  modified_base (9)..(9): 2'-OMe-nucleotide
  modified_base (10)..(10): 2'-OMe-nucleotide
  modified_base (11)..(11): 2'-OMe-nucleotide
  modified_base (12)..(12): 2'-OMe-nucleotide
  modified_base (13)..(13): 2'-OMe-nucleotide
  modified_base (14)..(14): 2'-fluoro-nucleotide
  modified_base (15)..(15): 2'-OMe-nucleotide
  modified_base (16)..(16): 2'-fluoro-nucleotide
  modified_base (17)..(17): 2'-OMe-nucleotide
  modified_base (18)..(18): 2'-OMe-nucleotide
  modified_base (19)..(19): 2'-OMe-nucleotide
  misc_feature (19)..(20): /note="phosphorothioate bond"
  modified_base (20)..(20): 2'-OMe-nucleotide
  misc_feature (20)..(21): /note="phosphorothioate bond"
  modified_base (21)..(21): 2'-OMe-nucleotide
ugccucgauaacuccguccaa

SEQ ID NO: 1502 - RNA, 21 nt, Artificial Sequence
  source: /note="Description of Artificial Sequence: Synthetic oligonucleotide"
  modified_base (1)..(1): 2'-OMe-nucleotide
  misc_feature (1)..(2): /note="phosphorothioate bond"
  modified_base (2)..(2): 2'-fluoro-nucleotide
  misc_feature (2)..(3): /note="phosphorothioate bond"
  modified_base (3)..(3): 2'-OMe-nucleotide
  modified_base (4)..(4): 2'-fluoro-nucleotide
  modified_base (5)..(5): 2'-OMe-nucleotide
  modified_base (6)..(6): 2'-OMe-nucleotide
  modified_base (7)..(7): 2'-OMe-nucleotide
  modified_base (8)..(8): 2'-fluoro-nucleotide
  modified_base (9)..(9): 2'-fluoro-nucleotide
  modified_base (10)..(10): 2'-OMe-nucleotide
  modified_base (11)..(11): 2'-OMe-nucleotide
  modified_base (12)..(12): 2'-OMe-nucleotide
  modified_base (13)..(13): 2'-OMe-nucleotide
  modified_base (14)..(14): 2'-fluoro-nucleotide
  modified_base (15)..(15): 2'-OMe-nucleotide
  modified_base (16)..(16): 2'-fluoro-nucleotide
  modified_base (17)..(17): 2'-OMe-nucleotide
  modified_base (18)..(18): 2'-OMe-nucleotide
  modified_base (19)..(19): 2'-OMe-nucleotide
  misc_feature (19)..(20): /note="phosphorothioate bond"
  modified_base (20)..(20): 2'-OMe-nucleotide
  misc_feature (20)..(21): /note="phosphorothioate bond"
  modified_base (21)..(21): 2'-OMe-nucleotide
ugccucgauaacuccguccaa

SEQ ID NO: 1503 - RNA, 21 nt, Artificial Sequence
  source: /note="Description of Artificial Sequence: Synthetic oligonucleotide"
  modified_base (1)..(1): 2'-OMe-nucleotide
  misc_feature (1)..(2): /note="phosphorothioate bond"
  modified_base (2)..(2): 2'-fluoro-nucleotide
  misc_feature (2)..(3): /note="phosphorothioate bond"
  modified_base (3)..(3): 2'-OMe-nucleotide
  modified_base (4)..(4): 2'-fluoro-nucleotide
  modified_base (5)..(5): 2'-OMe-nucleotide
  modified_base (6)..(6): 2'-OMe-nucleotide
  modified_base (7)..(7): 2'-OMe-nucleotide
  modified_base (8)..(8): 2'-OMe-nucleotide
  modified_base (9)..(9): 2'-fluoro-nucleotide
  modified_base (10)..(10): 2'-OMe-nucleotide
  modified_base (11)..(11): 2'-OMe-nucleotide
  modified_base (12)..(12): 2'-OMe-nucleotide
  modified_base (13)..(13): 2'-OMe-nucleotide
  modified_base (14)..(14): 2'-fluoro-nucleotide
  modified_base (15)..(15): 2'-OMe-nucleotide
  modified_base (16)..(16): 2'-fluoro-nucleotide
  modified_base (17)..(17): 2'-OMe-nucleotide
  modified_base (18)..(18): 2'-OMe-nucleotide
  modified_base (19)..(19): 2'-OMe-nucleotide
  misc_feature (19)..(20): /note="phosphorothioate bond"
  modified_base (20)..(20): 2'-OMe-nucleotide
  misc_feature (20)..(21): /note="phosphorothioate bond"
  modified_base (21)..(21): 2'-OMe-nucleotide
ugccucgauaacuccguccaa

SEQ ID NO: 1504 - DNA, 21 bp, Artificial Sequence
  source: /note="Description of Artificial Sequence: Synthetic oligonucleotide"
  source: /note="Description of Combined DNA/RNA Molecule: Synthetic oligonucleotide"
  modified_base (1)..(1): 2'-fluoro-nucleotide
  misc_feature (1)..(2): /note="phosphorothioate bond"
  modified_base (2)..(2): 2'-fluoro-nucleotide
  misc_feature (2)..(3): /note="phosphorothioate bond"
  modified_base (3)..(3): 2'-OMe-nucleotide
  modified_base (4)..(4): 2'-fluoro-nucleotide
  modified_base (5)..(5): 2'-OMe-nucleotide
  modified_base (6)..(6): 2'-fluoro-nucleotide
  modified_base (7)..(7): 2'-OMe-nucleotide
  modified_base (8)..(8): 2'-fluoro-nucleotide
  modified_base (9)..(9): 2'-OMe-nucleotide
  modified_base (10)..(10): 2'-fluoro-nucleotide
  modified_base (11)..(11): 2'-OMe-nucleotide
  modified_base (12)..(12): 2'-OMe-nucleotide
  modified_base (13)..(13): 2'-OMe-nucleotide
  modified_base (14)..(14): 2'-fluoro-nucleotide
  modified_base (15)..(15): 2'-OMe-nucleotide
  modified_base (16)..(16): 2'-fluoro-nucleotide
  modified_base (17)..(17): 2'-OMe-nucleotide
  modified_base (18)..(18): 2'-fluoro-nucleotide
  modified_base (19)..(19): 2'-OMe-nucleotide
  misc_feature (19)..(20): /note="phosphorothioate bond"
  modified_base (20)..(20): dT
  misc_feature (20)..(21): /note="phosphorothioate bond"
  modified_base (21)..(21): dT
ugccucgauaacuccgucctt

SEQ ID NO: 1505 - RNA, 21 nt, Artificial Sequence
  source: /note="Description of Artificial Sequence: Synthetic oligonucleotide"
  modified_base (1)..(1): 2'-OMe-nucleotide
  misc_feature (1)..(2): /note="phosphorothioate bond"
  modified_base (2)..(2): 2'-fluoro-nucleotide
  misc_feature (2)..(3): /note="phosphorothioate bond"
  modified_base (3)..(3): 2'-OMe-nucleotide
  modified_base (4)..(4): 2'-fluoro-nucleotide
  modified_base (5)..(5): 2'-OMe-nucleotide
  modified_base (6)..(6): 2'-OMe-nucleotide
  modified_base (7)..(7): 2'-OMe-nucleotide
  modified_base (8)..(8): 2'-OMe-nucleotide
  modified_base (9)..(9): 2'-OMe-nucleotide
  modified_base (10)..(10): 2'-OMe-nucleotide
  modified_base (11)..(11): 2'-OMe-nucleotide
  modified_base (12)..(12): 2'-OMe-nucleotide
  modified_base (13)..(13): 2'-OMe-nucleotide
  modified_base (14)..(14): 2'-fluoro-nucleotide
  modified_base (15)..(15): 2'-OMe-nucleotide
  modified_base (16)..(16): 2'-fluoro-nucleotide
  modified_base (17)..(17): 2'-OMe-nucleotide
  modified_base (18)..(18): 2'-OMe-nucleotide
  modified_base (19)..(19): 2'-OMe-nucleotide
  misc_feature (19)..(20): /note="phosphorothioate bond"
  modified_base (20)..(20): 2'-OMe-nucleotide
  misc_feature (20)..(21): /note="phosphorothioate bond"
  modified_base (21)..(21): 2'-OMe-nucleotide
ugccucgauaacuccguccaa

SEQ ID NO: 1506 - RNA, 21 nt, Artificial Sequence
  source: /note="Description of Artificial Sequence: Synthetic oligonucleotide"
  modified_base (1)..(1): 2'-OMe-nucleotide
  misc_feature (1)..(2): /note="phosphorothioate bond"
  modified_base (2)..(2): 2'-fluoro-nucleotide
  misc_feature (2)..(3): /note="phosphorothioate bond"
  modified_base (3)..(3): 2'-OMe-nucleotide
  modified_base (4)..(4): 2'-OMe-nucleotide
  modified_base (5)..(5): 2'-OMe-nucleotide
  modified_base (6)..(6): 2'-fluoro-nucleotide
  modified_base (7)..(7): 2'-OMe-nucleotide
  modified_base (8)..(8): 2'-OMe-nucleotide
  modified_base (9)..(9): 2'-OMe-nucleotide
  modified_base (10)..(10): 2'-OMe-nucleotide
  modified_base (11)..(11): 2'-OMe-nucleotide
  modified_base (12)..(12): 2'-OMe-nucleotide
  modified_base (13)..(13): 2'-OMe-nucleotide
  modified_base (14)..(14): 2'-fluoro-nucleotide
  modified_base (15)..(15): 2'-OMe-nucleotide
  modified_base (16)..(16): 2'-fluoro-nucleotide
  modified_base (17)..(17): 2'-OMe-nucleotide
  modified_base (18)..(18): 2'-OMe-nucleotide
  modified_base (19)..(19): 2'-OMe-nucleotide
  misc_feature (19)..(20): /note="phosphorothioate bond"
  modified_base (20)..(20): 2'-OMe-nucleotide
  misc_feature (20)..(21): /note="phosphorothioate bond"
  modified_base (21)..(21): 2'-OMe-nucleotide
ugccucgauaacuccguccaa

SEQ ID NO: 1507 - RNA, 21 nt, Artificial Sequence
  source: /note="Description of Artificial Sequence: Synthetic oligonucleotide"
  modified_base (1)..(1): 2'-OMe-nucleotide
  misc_feature (1)..(2): /note="phosphorothioate bond"
  modified_base (2)..(2): 2'-fluoro-nucleotide
  misc_feature (2)..(3): /note="phosphorothioate bond"
  modified_base (3)..(3): 2'-OMe-nucleotide
  modified_base (4)..(4): 2'-fluoro-nucleotide
  modified_base (5)..(5): 2'-OMe-nucleotide
  modified_base (6)..(6): 2'-OMe-nucleotide
  modified_base (7)..(7): 2'-OMe-nucleotide
  modified_base (8)..(8): 2'-fluoro-nucleotide
  modified_base (9)..(9): 2'-fluoro-nucleotide
  modified_base (10)..(10): 2'-OMe-nucleotide
  modified_base (11)..(11): 2'-OMe-nucleotide
  modified_base (12)..(12): 2'-OMe-nucleotide
  modified_base (13)..(13): 2'-OMe-nucleotide
  modified_base (14)..(14): 2'-fluoro-nucleotide
  modified_base (15)..(15): 2'-OMe-nucleotide
  modified_base (16)..(16): 2'-fluoro-nucleotide
  modified_base (17)..(17): 2'-OMe-nucleotide
  modified_base (18)..(18): 2'-OMe-nucleotide
  modified_base (19)..(19): 2'-OMe-nucleotide
  misc_feature (19)..(20): /note="phosphorothioate bond"
  modified_base (20)..(20): 2'-OMe-nucleotide
  misc_feature (20)..(21): /note="phosphorothioate bond"
  modified_base (21)..(21): 2'-OMe-nucleotide
ugccucgauaacuccguccaa

SEQ ID NO: 1508 - RNA, 21 nt, Artificial Sequence
  source: /note="Description of Artificial Sequence: Synthetic oligonucleotide"
  modified_base (1)..(1): 2'-OMe-nucleotide
  misc_feature (1)..(2): /note="phosphorothioate bond"
  modified_base (2)..(2): 2'-fluoro-nucleotide
  misc_feature (2)..(3): /note="phosphorothioate bond"
  modified_base (3)..(3): 2'-OMe-nucleotide
  modified_base (4)..(4): 2'-fluoro-nucleotide
  modified_base (5)..(5): 2'-OMe-nucleotide
  modified_base (6)..(6): 2'-OMe-nucleotide
  modified_base (7)..(7): 2'-OMe-nucleotide
  modified_base (8)..(8): 2'-OMe-nucleotide
  modified_base (9)..(9): 2'-fluoro-nucleotide
  modified_base (10)..(10): 2'-OMe-nucleotide
  modified_base (11)..(11): 2'-OMe-nucleotide
  modified_base (12)..(12): 2'-OMe-nucleotide
  modified_base (13)..(13): 2'-OMe-nucleotide
  modified_base (14)..(14): 2'-fluoro-nucleotide
  modified_base (15)..(15): 2'-OMe-nucleotide
  modified_base (16)..(16): 2'-fluoro-nucleotide
  modified_base (17)..(17): 2'-OMe-nucleotide
  modified_base (18)..(18): 2'-OMe-nucleotide
  modified_base (19)..(19): 2'-OMe-nucleotide
  misc_feature (19)..(20): /note="phosphorothioate bond"
  modified_base (20)..(20): 2'-OMe-nucleotide
  misc_feature (20)..(21): /note="phosphorothioate bond"
  modified_base (21)..(21): 2'-OMe-nucleotide
ugccucgauaacuccguccaa

SEQ ID NO: 1509 - DNA, 21 bp, Artificial Sequence
  source: /note="Description of Artificial Sequence: Synthetic oligonucleotide"
  source: /note="Description of Combined DNA/RNA Molecule: Synthetic oligonucleotide"
  modified_base (1)..(1): 2'-fluoro-nucleotide
  misc_feature (1)..(2): /note="phosphorothioate bond"
  modified_base (2)..(2): 2'-fluoro-nucleotide
  misc_feature (2)..(3): /note="phosphorothioate bond"
  modified_base (3)..(3): 2'-OMe-nucleotide
  modified_base (4)..(4): 2'-fluoro-nucleotide
  modified_base (5)..(5): 2'-OMe-nucleotide
  modified_base (6)..(6): 2'-fluoro-nucleotide
  modified_base (7)..(7): 2'-OMe-nucleotide
  modified_base (8)..(8): 2'-fluoro-nucleotide
  modified_base (9)..(9): 2'-OMe-nucleotide
  modified_base (10)..(10): 2'-fluoro-nucleotide
  modified_base (11)..(11): 2'-OMe-nucleotide
  modified_base (12)..(12): 2'-OMe-nucleotide
  modified_base (13)..(13): 2'-OMe-nucleotide
  modified_base (14)..(14): 2'-fluoro-nucleotide
  modified_base (15)..(15): 2'-OMe-nucleotide
  modified_base (16)..(16): 2'-fluoro-nucleotide
  modified_base (17)..(17): 2'-OMe-nucleotide
  modified_base (18)..(18): 2'-fluoro-nucleotide
  modified_base (19)..(19): 2'-OMe-nucleotide
  misc_feature (19)..(20): /note="phosphorothioate bond"
  modified_base (20)..(20): dT
  misc_feature (20)..(21): /note="phosphorothioate bond"
  modified_base (21)..(21): dT
ugccucgauaacuccgucctt

SEQ ID NO: 1510 - RNA, 21 nt, Artificial Sequence
  source: /note="Description of Artificial Sequence: Synthetic oligonucleotide"
  modified_base (1)..(1): 2'-OMe-nucleotide
  misc_feature (1)..(2): /note="phosphorothioate bond"
  modified_base (2)..(2): 2'-fluoro-nucleotide
  misc_feature (2)..(3): /note="phosphorothioate bond"
  modified_base (3)..(3): 2'-OMe-nucleotide
  modified_base (4)..(4): 2'-fluoro-nucleotide
  modified_base (5)..(5): 2'-OMe-nucleotide
  modified_base (6)..(6): 2'-OMe-nucleotide
  modified_base (7)..(7): 2'-OMe-nucleotide
  modified_base (8)..(8): 2'-OMe-nucleotide
  modified_base (9)..(9): 2'-OMe-nucleotide
  modified_base (10)..(10): 2'-OMe-nucleotide
  modified_base (11)..(11): 2'-OMe-nucleotide
  modified_base (12)..(12): 2'-OMe-nucleotide
  modified_base (13)..(13): 2'-OMe-nucleotide
  modified_base (14)..(14): 2'-fluoro-nucleotide
  modified_base (15)..(15): 2'-OMe-nucleotide
  modified_base (16)..(16): 2'-fluoro-nucleotide
  modified_base (17)..(17): 2'-OMe-nucleotide
  modified_base (18)..(18): 2'-OMe-nucleotide
  modified_base (19)..(19): 2'-OMe-nucleotide
  misc_feature (19)..(20): /note="phosphorothioate bond"
  modified_base (20)..(20): Locked nucleic acid (LNA) nucleotide
  misc_feature (20)..(21): /note="phosphorothioate bond"
  modified_base (21)..(21): Locked nucleic acid (LNA) nucleotide
ugccucgauaacuccguccaa

SEQ ID NO: 1511 - RNA, 21 nt, Artificial Sequence
  source: /note="Description of Artificial Sequence: Synthetic oligonucleotide"
  modified_base (1)..(1): 2'-OMe-nucleotide
  misc_feature (1)..(2): /note="phosphorothioate bond"
  modified_base (2)..(2): 2'-fluoro-nucleotide
  misc_feature (2)..(3): /note="phosphorothioate bond"
  modified_base (3)..(3): 2'-OMe-nucleotide
  modified_base (4)..(4): 2'-OMe-nucleotide
  modified_base (5)..(5): 2'-OMe-nucleotide
  modified_base (6)..(6): 2'-fluoro-nucleotide
  modified_base (7)..(7): 2'-OMe-nucleotide
  modified_base (8)..(8): 2'-OMe-nucleotide
  modified_base (9)..(9): 2'-OMe-nucleotide
  modified_base (10)..(10): 2'-OMe-nucleotide
  modified_base (11)..(11): 2'-OMe-nucleotide
  modified_base (12)..(12): 2'-OMe-nucleotide
  modified_base (13)..(13): 2'-OMe-nucleotide
  modified_base (14)..(14): 2'-fluoro-nucleotide
  modified_base (15)..(15): 2'-OMe-nucleotide
  modified_base (16)..(16): 2'-fluoro-nucleotide
  modified_base (17)..(17): 2'-OMe-nucleotide
  modified_base (18)..(18): 2'-OMe-nucleotide
  modified_base (19)..(19): 2'-OMe-nucleotide
  misc_feature (19)..(20): /note="phosphorothioate bond"
  modified_base (20)..(20): Locked nucleic acid (LNA) nucleotide
  misc_feature (20)..(21): /note="phosphorothioate bond"
  modified_base (21)..(21): Locked nucleic acid (LNA) nucleotide
ugccucgauaacuccguccaa

SEQ ID NO: 1512 - RNA, 21 nt, Artificial Sequence
  source: /note="Description of Artificial Sequence: Synthetic oligonucleotide"
  modified_base (1)..(1): 2'-OMe-nucleotide
  misc_feature (1)..(2): /note="phosphorothioate bond"
  modified_base (2)..(2): 2'-fluoro-nucleotide
  misc_feature (2)..(3): /note="phosphorothioate bond"
  modified_base (3)..(3): 2'-OMe-nucleotide
  modified_base (4)..(4): 2'-fluoro-nucleotide
  modified_base (5)..(5): 2'-OMe-nucleotide
  modified_base (6)..(6): 2'-OMe-nucleotide
  modified_base (7)..(7): 2'-OMe-nucleotide
  modified_base (8)..(8): 2'-fluoro-nucleotide
  modified_base (9)..(9): 2'-fluoro-nucleotide
  modified_base (10)..(10): 2'-OMe-nucleotide
  modified_base (11)..(11): 2'-OMe-nucleotide
  modified_base (12)..(12): 2'-OMe-nucleotide
  modified_base (13)..(13): 2'-OMe-nucleotide
  modified_base (14)..(14): 2'-fluoro-nucleotide
  modified_base (15)..(15): 2'-OMe-nucleotide
  modified_base (16)..(16): 2'-fluoro-nucleotide
  modified_base (17)..(17): 2'-OMe-nucleotide
  modified_base (18)..(18): 2'-OMe-nucleotide
  modified_base (19)..(19): 2'-OMe-nucleotide
  misc_feature (19)..(20): /note="phosphorothioate bond"
  modified_base (20)..(20): Locked nucleic acid (LNA) nucleotide
  misc_feature (20)..(21): /note="phosphorothioate bond"
  modified_base (21)..(21): Locked nucleic acid (LNA) nucleotide
ugccucgauaacuccguccaa

SEQ ID NO: 1513 - RNA, 21 nt, Artificial Sequence
  source: /note="Description of Artificial Sequence: Synthetic oligonucleotide"
  modified_base (1)..(1): 2'-OMe-nucleotide
  misc_feature (1)..(2): /note="phosphorothioate bond"
  modified_base (2)..(2): 2'-fluoro-nucleotide
  misc_feature (2)..(3): /note="phosphorothioate bond"
  modified_base (3)..(3): 2'-OMe-nucleotide
  modified_base (4)..(4): 2'-fluoro-nucleotide
  modified_base (5)..(5): 2'-OMe-nucleotide
  modified_base (6)..(6): 2'-OMe-nucleotide
  modified_base (7)..(7): 2'-OMe-nucleotide
  modified_base (8)..(8): 2'-OMe-nucleotide
  modified_base (9)..(9): 2'-fluoro-nucleotide
  modified_base (10)..(10): 2'-OMe-nucleotide
  modified_base (11)..(11): 2'-OMe-nucleotide
  modified_base (12)..(12): 2'-OMe-nucleotide
  modified_base (13)..(13): 2'-OMe-nucleotide
  modified_base (14)..(14): 2'-fluoro-nucleotide
  modified_base (15)..(15): 2'-OMe-nucleotide
  modified_base (16)..(16): 2'-fluoro-nucleotide
  modified_base (17)..(17): 2'-OMe-nucleotide
  modified_base (18)..(18): 2'-OMe-nucleotide
  modified_base (19)..(19): 2'-OMe-nucleotide
  misc_feature (19)..(20): /note="phosphorothioate bond"
  modified_base (20)..(20): Locked nucleic acid (LNA) nucleotide
  misc_feature (20)..(21): /note="phosphorothioate bond"
  modified_base (21)..(21): Locked nucleic acid (LNA) nucleotide
ugccucgauaacuccguccaa

SEQ ID NO: 1514 - RNA, 21 nt, Artificial Sequence
  source: /note="Description of Artificial Sequence: Synthetic oligonucleotide"
  modified_base (1)..(1): 2'-OMe-nucleotide
  misc_feature (1)..(2): /note="phosphorothioate bond"
  modified_base (2)..(2): 2'-fluoro-nucleotide
  misc_feature (2)..(3): /note="phosphorothioate bond"
  modified_base (3)..(3): 2'-OMe-nucleotide
  modified_base (4)..(4): 2'-fluoro-nucleotide
  modified_base (5)..(5): 2'-OMe-nucleotide
  modified_base (6)..(6): 2'-OMe-nucleotide
  modified_base (7)..(7): 2'-OMe-nucleotide
  modified_base (8)..(8): 2'-OMe-nucleotide
  modified_base (9)..(9): 2'-OMe-nucleotide
  modified_base (10)..(10): 2'-OMe-nucleotide
  modified_base (11)..(11): 2'-OMe-nucleotide
  modified_base (12)..(12): 2'-OMe-nucleotide
  modified_base (13)..(13): 2'-OMe-nucleotide
  modified_base (14)..(14): 2'-fluoro-nucleotide
  modified_base (15)..(15): 2'-OMe-nucleotide
  modified_base (16)..(16): 2'-fluoro-nucleotide
  modified_base (17)..(17): 2'-OMe-nucleotide
  modified_base (18)..(18): 2'-OMe-nucleotide
  modified_base (19)..(19): 2'-OMe-nucleotide
  misc_feature (19)..(20): /note="phosphorothioate bond"
  modified_base (20)..(20): 2'-OMe-nucleotide
  misc_feature (20)..(21): /note="phosphorothioate bond"
  modified_base (21)..(21): 2'-OMe-nucleotide
ugccucgauaacuccguccaa

SEQ ID NO: 1515 - RNA, 21 nt, Artificial Sequence
  source: /note="Description of Artificial Sequence: Synthetic oligonucleotide"
  modified_base (1)..(1): 2'-OMe-nucleotide
  misc_feature (1)..(2): /note="phosphorothioate bond"
  modified_base (2)..(2): 2'-fluoro-nucleotide
  misc_feature (2)..(3): /note="phosphorothioate bond"
  modified_base (3)..(3): 2'-OMe-nucleotide
  modified_base (4)..(4): 2'-OMe-nucleotide
  modified_base (5)..(5): 2'-OMe-nucleotide
  modified_base (6)..(6): 2'-fluoro-nucleotide
  modified_base (7)..(7): 2'-OMe-nucleotide
  modified_base (8)..(8): 2'-OMe-nucleotide
  modified_base (9)..(9): 2'-OMe-nucleotide
  modified_base (10)..(10): 2'-OMe-nucleotide
  modified_base (11)..(11): 2'-OMe-nucleotide
  modified_base (12)..(12): 2'-OMe-nucleotide
  modified_base (13)..(13): 2'-OMe-nucleotide
  modified_base (14)..(14): 2'-fluoro-nucleotide
  modified_base (15)..(15): 2'-OMe-nucleotide
  modified_base (16)..(16): 2'-fluoro-nucleotide
  modified_base (17)..(17): 2'-OMe-nucleotide
  modified_base (18)..(18): 2'-OMe-nucleotide
  modified_base (19)..(19): 2'-OMe-nucleotide
  misc_feature (19)..(20): /note="phosphorothioate bond"
  modified_base (20)..(20): 2'-OMe-nucleotide
  misc_feature (20)..(21): /note="phosphorothioate bond"
  modified_base (21)..(21): 2'-OMe-nucleotide
ugccucgauaacuccguccaa

SEQ ID NO: 1516 - RNA, 21 nt, Artificial Sequence
  source: /note="Description of Artificial Sequence: Synthetic oligonucleotide"
  modified_base (1)..(1): 2'-OMe-nucleotide
  misc_feature (1)..(2): /note="phosphorothioate bond"
  modified_base (2)..(2): 2'-fluoro-nucleotide
  misc_feature (2)..(3): /note="phosphorothioate bond"
  modified_base (3)..(3): 2'-OMe-nucleotide
  modified_base (4)..(4): 2'-fluoro-nucleotide
  modified_base (5)..(5): 2'-OMe-nucleotide
  modified_base (6)..(6): 2'-OMe-nucleotide
  modified_base (7)..(7): 2'-OMe-nucleotide
  modified_base (8)..(8): 2'-fluoro-nucleotide
  modified_base (9)..(9): 2'-fluoro-nucleotide
  modified_base (10)..(10): 2'-OMe-nucleotide
  modified_base (11)..(11): 2'-OMe-nucleotide
  modified_base (12)..(12): 2'-OMe-nucleotide
  modified_base (13)..(13): 2'-OMe-nucleotide
  modified_base (14)..(14): 2'-fluoro-nucleotide
  modified_base (15)..(15): 2'-OMe-nucleotide
  modified_base (16)..(16): 2'-fluoro-nucleotide
  modified_base (17)..(17): 2'-OMe-nucleotide
  modified_base (18)..(18): 2'-OMe-nucleotide
  modified_base (19)..(19): 2'-OMe-nucleotide
  misc_feature (19)..(20): /note="phosphorothioate bond"
  modified_base (20)..(20): 2'-OMe-nucleotide
  misc_feature (20)..(21): /note="phosphorothioate bond"
  modified_base (21)..(21): 2'-OMe-nucleotide
ugccucgauaacuccguccaa

SEQ ID NO: 1517 - RNA, 21 nt, Artificial Sequence
  source: /note="Description of Artificial Sequence: Synthetic oligonucleotide"
  modified_base (1)..(1): 2'-OMe-nucleotide
  misc_feature (1)..(2): /note="phosphorothioate bond"
  modified_base (2)..(2): 2'-fluoro-nucleotide
  misc_feature (2)..(3): /note="phosphorothioate bond"
  modified_base (3)..(3): 2'-OMe-nucleotide
  modified_base (4)..(4): 2'-fluoro-nucleotide
  modified_base (5)..(5): 2'-OMe-nucleotide
  modified_base (6)..(6): 2'-OMe-nucleotide
  modified_base (7)..(7): 2'-OMe-nucleotide
  modified_base (8)..(8): 2'-OMe-nucleotide
  modified_base (9)..(9): 2'-fluoro-nucleotide
  modified_base (10)..(10): 2'-OMe-nucleotide
  modified_base (11)..(11): 2'-OMe-nucleotide
  modified_base (12)..(12): 2'-OMe-nucleotide
  modified_base (13)..(13): 2'-OMe-nucleotide
  modified_base (14)..(14): 2'-fluoro-nucleotide
  modified_base (15)..(15): 2'-OMe-nucleotide
  modified_base (16)..(16): 2'-fluoro-nucleotide
  modified_base (17)..(17): 2'-OMe-nucleotide
  modified_base (18)..(18): 2'-OMe-nucleotide
  modified_base (19)..(19): 2'-OMe-nucleotide
  misc_feature (19)..(20): /note="phosphorothioate bond"
  modified_base (20)..(20): 2'-OMe-nucleotide
  misc_feature (20)..(21): /note="phosphorothioate bond"
  modified_base (21)..(21): 2'-OMe-nucleotide
ugccucgauaacuccguccaa

SEQ ID NO: 1518 - DNA, 21 bp, Artificial Sequence
  source: /note="Description of Artificial Sequence: Synthetic oligonucleotide"
  source: /note="Description of Combined DNA/RNA Molecule: Synthetic oligonucleotide"
  modified_base (1)..(1): 2'-fluoro-nucleotide
  misc_feature (1)..(2): /note="phosphorothioate bond"
  modified_base (2)..(2): 2'-fluoro-nucleotide
  misc_feature (2)..(3): /note="phosphorothioate bond"
  modified_base (3)..(3): 2'-OMe-nucleotide
  modified_base (4)..(4): 2'-fluoro-nucleotide
  modified_base (5)..(5): 2'-OMe-nucleotide
  modified_base (6)..(6): 2'-fluoro-nucleotide
  modified_base (7)..(7): 2'-OMe-nucleotide
  modified_base (8)..(8): 2'-fluoro-nucleotide
  modified_base (9)..(9): 2'-OMe-nucleotide
  modified_base (10)..(10): 2'-fluoro-nucleotide
  modified_base (11)..(11): 2'-OMe-nucleotide
  modified_base (12)..(12): 2'-OMe-nucleotide
  modified_base (13)..(13): 2'-OMe-nucleotide
  modified_base (14)..(14): 2'-fluoro-nucleotide
  modified_base (15)..(15): 2'-OMe-nucleotide
  modified_base (16)..(16): 2'-fluoro-nucleotide
  modified_base (17)..(17): 2'-OMe-nucleotide
  modified_base (18)..(18): 2'-fluoro-nucleotide
  modified_base (19)..(19): 2'-OMe-nucleotide
  misc_feature (19)..(20): /note="phosphorothioate bond"
  modified_base (20)..(20): dT
  misc_feature (20)..(21): /note="phosphorothioate bond"
  modified_base (21)..(21): dT
ugccucgauaacuccgucctt

SEQ ID NO: 1519 - RNA, 21 nt, Artificial Sequence
  source: /note="Description of Artificial Sequence: Synthetic oligonucleotide"
  modified_base (1)..(1): 2'-OMe-nucleotide
  misc_feature (1)..(2): /note="phosphorothioate bond"
  modified_base (2)..(2): 2'-fluoro-nucleotide
  misc_feature (2)..(3): /note="phosphorothioate bond"
  modified_base (3)..(3): 2'-OMe-nucleotide
  modified_base (4)..(4): 2'-fluoro-nucleotide
  modified_base (5)..(5): 2'-OMe-nucleotide
  modified_base (6)..(6): 2'-OMe-nucleotide
  modified_base (7)..(7): 2'-OMe-nucleotide
  modified_base (8)..(8): 2'-OMe-nucleotide
  modified_base (9)..(9): 2'-OMe-nucleotide
  modified_base (10)..(10): 2'-OMe-nucleotide
  modified_base (11)..(11): 2'-OMe-nucleotide
  modified_base (12)..(12): 2'-OMe-nucleotide
  modified_base (13)..(13): 2'-OMe-nucleotide
  modified_base (14)..(14): 2'-fluoro-nucleotide
  modified_base (15)..(15): 2'-OMe-nucleotide
  modified_base (16)..(16): 2'-fluoro-nucleotide
  modified_base (17)..(17): 2'-OMe-nucleotide
  modified_base (18)..(18): 2'-OMe-nucleotide
  modified_base (19)..(19): 2'-OMe-nucleotide
  misc_feature (19)..(20): /note="phosphorothioate bond"
  modified_base (20)..(20): Locked nucleic acid (LNA) nucleotide
  misc_feature (20)..(21): /note="phosphorothioate bond"
  modified_base (21)..(21): Locked nucleic acid (LNA) nucleotide
ugccucgauaacuccguccaa

SEQ ID NO: 1520 - RNA, 21 nt, Artificial Sequence
  source: /note="Description of Artificial Sequence: Synthetic oligonucleotide"
  modified_base (1)..(1): 2'-OMe-nucleotide
  misc_feature (1)..(2): /note="phosphorothioate bond"
  modified_base (2)..(2): 2'-fluoro-nucleotide
  misc_feature (2)..(3): /note="phosphorothioate bond"
  modified_base (3)..(3): 2'-OMe-nucleotide
  modified_base (4)..(4): 2'-OMe-nucleotide
  modified_base (5)..(5): 2'-OMe-nucleotide
  modified_base (6)..(6): 2'-fluoro-nucleotide
  modified_base (7)..(7): 2'-OMe-nucleotide
  modified_base (8)..(8): 2'-OMe-nucleotide
  modified_base (9)..(9): 2'-OMe-nucleotide
  modified_base (10)..(10): 2'-OMe-nucleotide
  modified_base (11)..(11): 2'-OMe-nucleotide
  modified_base (12)..(12): 2'-OMe-nucleotide
  modified_base (13)..(13): 2'-OMe-nucleotide
  modified_base (14)..(14): 2'-fluoro-nucleotide
  modified_base (15)..(15): 2'-OMe-nucleotide
  modified_base (16)..(16): 2'-fluoro-nucleotide
  modified_base (17)..(17): 2'-OMe-nucleotide
  modified_base (18)..(18): 2'-OMe-nucleotide
  modified_base (19)..(19): 2'-OMe-nucleotide
  misc_feature (19)..(20): /note="phosphorothioate bond"
  modified_base (20)..(20): Locked nucleic acid (LNA) nucleotide
  misc_feature (20)..(21): /note="phosphorothioate bond"
  modified_base (21)..(21): Locked nucleic acid (LNA) nucleotide
ugccucgauaacuccguccaa

SEQ ID NO: 1521 - RNA, 21 nt, Artificial Sequence
  source: /note="Description of Artificial Sequence: Synthetic oligonucleotide"
  modified_base (1)..(1): 2'-OMe-nucleotide
  misc_feature (1)..(2): /note="phosphorothioate bond"
  modified_base (2)..(2): 2'-fluoro-nucleotide
  misc_feature (2)..(3): /note="phosphorothioate bond"
  modified_base (3)..(3): 2'-OMe-nucleotide
  modified_base (4)..(4): 2'-fluoro-nucleotide
  modified_base (5)..(5): 2'-OMe-nucleotide
  modified_base (6)..(6): 2'-OMe-nucleotide
  modified_base (7)..(7): 2'-OMe-nucleotide
  modified_base (8)..(8): 2'-fluoro-nucleotide
  modified_base (9)..(9): 2'-fluoro-nucleotide
  modified_base (10)..(10): 2'-OMe-nucleotide
  modified_base (11)..(11): 2'-OMe-nucleotide
  modified_base (12)..(12): 2'-OMe-nucleotide
  modified_base (13)..(13): 2'-OMe-nucleotide
  modified_base (14)..(14): 2'-fluoro-nucleotide
  modified_base (15)..(15): 2'-OMe-nucleotide
  modified_base (16)..(16): 2'-fluoro-nucleotide
  modified_base (17)..(17): 2'-OMe-nucleotide
  modified_base (18)..(18): 2'-OMe-nucleotide
  modified_base (19)..(19): 2'-OMe-nucleotide
  misc_feature (19)..(20): /note="phosphorothioate bond"
  modified_base (20)..(20): Locked nucleic acid (LNA) nucleotide
  misc_feature (20)..(21): /note="phosphorothioate bond"
  modified_base (21)..(21): Locked nucleic acid (LNA) nucleotide
ugccucgauaacuccguccaa

SEQ ID NO: 1522 - RNA, 21 nt, Artificial Sequence
  source: /note="Description of Artificial Sequence: Synthetic oligonucleotide"
  modified_base (1)..(1): 2'-OMe-nucleotide
  misc_feature (1)..(2): /note="phosphorothioate bond"
  modified_base (2)..(2): 2'-fluoro-nucleotide
  misc_feature (2)..(3): /note="phosphorothioate bond"
  modified_base (3)..(3): 2'-OMe-nucleotide
  modified_base (4)..(4): 2'-fluoro-nucleotide
  modified_base (5)..(5): 2'-OMe-nucleotide
  modified_base (6)..(6): 2'-OMe-nucleotide
  modified_base (7)..(7): 2'-OMe-nucleotide
  modified_base (8)..(8): 2'-OMe-nucleotide
  modified_base (9)..(9): 2'-fluoro-nucleotide
  modified_base (10)..(10): 2'-OMe-nucleotide
  modified_base (11)..(11): 2'-OMe-nucleotide
  modified_base (12)..(12): 2'-OMe-nucleotide
  modified_base (13)..(13): 2'-OMe-nucleotide
  modified_base (14)..(14): 2'-fluoro-nucleotide
  modified_base (15)..(15): 2'-OMe-nucleotide
  modified_base (16)..(16): 2'-fluoro-nucleotide
  modified_base (17)..(17): 2'-OMe-nucleotide
  modified_base (18)..(18): 2'-OMe-nucleotide
  modified_base (19)..(19): 2'-OMe-nucleotide
  misc_feature (19)..(20): /note="phosphorothioate bond"
  modified_base (20)..(20): Locked nucleic acid (LNA) nucleotide
  misc_feature (20)..(21): /note="phosphorothioate bond"
  modified_base (21)..(21): Locked nucleic acid (LNA) nucleotide
ugccucgauaacuccguccaa

SEQ ID NO: 1523 - RNA, 21 nt, Artificial Sequence
  source: /note="Description of Artificial Sequence: Synthetic oligonucleotide"
  modified_base (1)..(1): 2'-OMe-nucleotide
  misc_feature (1)..(2): /note="phosphorothioate bond"
  modified_base (2)..(2): 2'-fluoro-nucleotide
  misc_feature (2)..(3): /note="phosphorothioate bond"
  modified_base (3)..(3): 2'-OMe-nucleotide
  modified_base (4)..(4): 2'-fluoro-nucleotide
  modified_base (5)..(5): 2'-OMe-nucleotide
  modified_base (6)..(6): 2'-OMe-nucleotide
  modified_base (7)..(7): 2'-OMe-nucleotide
  modified_base (8)..(8): 2'-OMe-nucleotide
  modified_base (9)..(9): 2'-OMe-nucleotide
  modified_base (10)..(10): 2'-OMe-nucleotide
  modified_base (11)..(11): 2'-OMe-nucleotide
  modified_base (12)..(12): 2'-OMe-nucleotide
  modified_base (13)..(13): 2'-OMe-nucleotide
  modified_base (14)..(14): 2'-fluoro-nucleotide
  modified_base (15)..(15): 2'-OMe-nucleotide
  modified_base (16)..(16): 2'-fluoro-nucleotide
  modified_base (17)..(17): 2'-OMe-nucleotide
  modified_base (18)..(18): 2'-OMe-nucleotide
  modified_base (19)..(19): 2'-OMe-nucleotide
  misc_feature (19)..(20): /note="phosphorothioate bond"
  modified_base (20)..(20): 2'-OMe-nucleotide
  misc_feature (20)..(21): /note="phosphorothioate bond"
  modified_base (21)..(21): 2'-OMe-nucleotide
ugccucgauaacuccguccaa

SEQ ID NO: 1524 - RNA, 21 nt, Artificial Sequence
  source: /note="Description of Artificial Sequence: Synthetic oligonucleotide"
  modified_base (1)..(1): 2'-OMe-nucleotide
  misc_feature (1)..(2): /note="phosphorothioate bond"
  modified_base (2)..(2): 2'-fluoro-nucleotide
  misc_feature (2)..(3): /note="phosphorothioate bond"
  modified_base (3)..(3): 2'-OMe-nucleotide
  modified_base (4)..(4): 2'-OMe-nucleotide
  modified_base (5)..(5): 2'-OMe-nucleotide
  modified_base (6)..(6): 2'-fluoro-nucleotide
  modified_base (7)..(7): 2'-OMe-nucleotide
  modified_base (8)..(8): 2'-OMe-nucleotide
  modified_base (9)..(9): 2'-OMe-nucleotide
  modified_base (10)..(10): 2'-OMe-nucleotide
  modified_base (11)..(11): 2'-OMe-nucleotide
  modified_base (12)..(12): 2'-OMe-nucleotide
  modified_base (13)..(13): 2'-OMe-nucleotide
  modified_base (14)..(14): 2'-fluoro-nucleotide
  modified_base (15)..(15): 2'-OMe-nucleotide
  modified_base (16)..(16): 2'-fluoro-nucleotide
  modified_base (17)..(17): 2'-OMe-nucleotide
  modified_base (18)..(18): 2'-OMe-nucleotide
  modified_base (19)..(19): 2'-OMe-nucleotide
  misc_feature (19)..(20): /note="phosphorothioate bond"
  modified_base (20)..(20): 2'-OMe-nucleotide
  misc_feature (20)..(21): /note="phosphorothioate bond"
  modified_base (21)..(21): 2'-OMe-nucleotide
ugccucgauaacuccguccaa

SEQ ID NO: 1525 - RNA, 21 nt, Artificial Sequence
  source: /note="Description of Artificial Sequence: Synthetic oligonucleotide"
  modified_base (1)..(1): 2'-OMe-nucleotide
  misc_feature (1)..(2): /note="phosphorothioate bond"
  modified_base (2)..(2): 2'-fluoro-nucleotide
  misc_feature (2)..(3): /note="phosphorothioate bond"
  modified_base (3)..(3): 2'-OMe-nucleotide
  modified_base (4)..(4): 2'-fluoro-nucleotide
  modified_base (5)..(5): 2'-OMe-nucleotide
  modified_base (6)..(6): 2'-OMe-nucleotide
  modified_base (7)..(7): 2'-OMe-nucleotide
  modified_base (8)..(8): 2'-fluoro-nucleotide
  modified_base (9)..(9): 2'-fluoro-nucleotide
  modified_base (10)..(10): 2'-OMe-nucleotide
  modified_base (11)..(11): 2'-OMe-nucleotide
  modified_base (12)..(12): 2'-OMe-nucleotide
  modified_base (13)..(13): 2'-OMe-nucleotide
  modified_base (14)..(14): 2'-fluoro-nucleotide
  modified_base (15)..(15): 2'-OMe-nucleotide
  modified_base (16)..(16): 2'-fluoro-nucleotide
  modified_base (17)..(17): 2'-OMe-nucleotide
  modified_base (18)..(18): 2'-OMe-nucleotide
  modified_base (19)..(19): 2'-OMe-nucleotide
  misc_feature (19)..(20): /note="phosphorothioate bond"
  modified_base (20)..(20): 2'-OMe-nucleotide
  misc_feature (20)..(21): /note="phosphorothioate bond"
  modified_base (21)..(21): 2'-OMe-nucleotide
ugccucgauaacuccguccaa

SEQ ID NO: 1526 - RNA, 21 nt, Artificial Sequence
  source: /note="Description of Artificial Sequence: Synthetic oligonucleotide"
  modified_base (1)..(1): 2'-OMe-nucleotide
  misc_feature (1)..(2): /note="phosphorothioate bond"
  modified_base (2)..(2): 2'-fluoro-nucleotide
  misc_feature (2)..(3): /note="phosphorothioate bond"
  modified_base (3)..(3): 2'-OMe-nucleotide
  modified_base (4)..(4): 2'-fluoro-nucleotide
  modified_base (5)..(5): 2'-OMe-nucleotide
  modified_base (6)..(6): 2'-OMe-nucleotide
  modified_base (7)..(7): 2'-OMe-nucleotide
  modified_base (8)..(8): 2'-OMe-nucleotide
  modified_base (9)..(9): 2'-fluoro-nucleotide
  modified_base (10)..(10): 2'-OMe-nucleotide
  modified_base (11)..(11): 2'-OMe-nucleotide
  modified_base (12)..(12): 2'-OMe-nucleotide
  modified_base (13)..(13): 2'-OMe-nucleotide
  modified_base (14)..(14): 2'-fluoro-nucleotide
  modified_base (15)..(15): 2'-OMe-nucleotide
  modified_base (16)..(16): 2'-fluoro-nucleotide
  modified_base (17)..(17): 2'-OMe-nucleotide
  modified_base (18)..(18): 2'-OMe-nucleotide
  modified_base (19)..(19): 2'-OMe-nucleotide
  misc_feature (19)..(20): /note="phosphorothioate bond"
  modified_base (20)..(20): 2'-OMe-nucleotide
  misc_feature (20)..(21): /note="phosphorothioate bond"
  modified_base (21)..(21): 2'-OMe-nucleotide
ugccucgauaacuccguccaa

SEQ ID NO: 1527 - DNA, 21 bp, Artificial Sequence
  source: /note="Description of Artificial Sequence: Synthetic oligonucleotide"
  source: /note="Description of Combined DNA/RNA Molecule: Synthetic oligonucleotide"
  modified_base (1)..(1): 2'-fluoro-nucleotide
  misc_feature (1)..(2): /note="phosphorothioate bond"
  modified_base (2)..(2): 2'-fluoro-nucleotide
  misc_feature (2)..(3): /note="phosphorothioate bond"
  modified_base (3)..(3): 2'-OMe-nucleotide
  modified_base (4)..(4): 2'-fluoro-nucleotide
  modified_base (5)..(5): 2'-OMe-nucleotide
  modified_base (6)..(6): 2'-fluoro-nucleotide
  modified_base (7)..(7): 2'-OMe-nucleotide
  modified_base (8)..(8): 2'-fluoro-nucleotide
  modified_base (9)..(9): 2'-OMe-nucleotide
  modified_base (10)..(10): 2'-fluoro-nucleotide
  modified_base (11)..(11): 2'-OMe-nucleotide
  modified_base (12)..(12): 2'-OMe-nucleotide
  modified_base (13)..(13): 2'-OMe-nucleotide
  modified_base (14)..(14): 2'-fluoro-nucleotide
  modified_base (15)..(15): 2'-OMe-nucleotide
  modified_base (16)..(16): 2'-fluoro-nucleotide
  modified_base (17)..(17): 2'-OMe-nucleotide
  modified_base (18)..(18): 2'-fluoro-nucleotide
  modified_base (19)..(19): 2'-OMe-nucleotide
  misc_feature (19)..(20): /note="phosphorothioate bond"
  modified_base (20)..(20): dT
  misc_feature (20)..(21): /note="phosphorothioate bond"
  modified_base (21)..(21): dT
ugccucgauaacuccgucctt

SEQ ID NO: 1528 - RNA, 21 nt, Artificial Sequence
  source: /note="Description of Artificial Sequence: Synthetic oligonucleotide"
  modified_base (1)..(1): 2'-OMe-nucleotide
  misc_feature (1)..(2): /note="phosphorothioate bond"
  modified_base (2)..(2): 2'-fluoro-nucleotide
  misc_feature (2)..(3): /note="phosphorothioate bond"
  modified_base (3)..(3): 2'-OMe-nucleotide
  modified_base (4)..(4): 2'-fluoro-nucleotide
  modified_base (5)..(5): 2'-OMe-nucleotide
  modified_base (6)..(6): 2'-OMe-nucleotide
  modified_base (7)..(7): 2'-OMe-nucleotide
  modified_base (8)..(8): 2'-OMe-nucleotide
  modified_base (9)..(9): 2'-OMe-nucleotide
  modified_base (10)..(10): 2'-OMe-nucleotide
  modified_base (11)..(11): 2'-OMe-nucleotide
  modified_base (12)..(12): 2'-OMe-nucleotide
  modified_base (13)..(13): 2'-OMe-nucleotide
  modified_base (14)..(14): 2'-fluoro-nucleotide
  modified_base (15)..(15): 2'-OMe-nucleotide
  modified_base (16)..(16): 2'-fluoro-nucleotide
  modified_base (17)..(17): 2'-OMe-nucleotide
  modified_base (18)..(18): 2'-OMe-nucleotide
  modified_base (19)..(19): 2'-OMe-nucleotide
  misc_feature (19)..(20): /note="phosphorothioate bond"
  modified_base (20)..(20): 2'-OMe-nucleotide
  misc_feature (20)..(21): /note="phosphorothioate bond"
  modified_base (21)..(21): 2'-OMe-nucleotide
ugccucgauaacuccguccaa

SEQ ID NO: 1529 - RNA, 21 nt, Artificial Sequence
  source: /note="Description of Artificial Sequence: Synthetic oligonucleotide"
  modified_base (1)..(1): 2'-OMe-nucleotide
  misc_feature (1)..(2): /note="phosphorothioate bond"
  modified_base (2)..(2): 2'-fluoro-nucleotide
  misc_feature (2)..(3): /note="phosphorothioate bond"
  modified_base (3)..(3): 2'-OMe-nucleotide
  modified_base (4)..(4): 2'-OMe-nucleotide
  modified_base (5)..(5): 2'-OMe-nucleotide
  modified_base (6)..(6): 2'-fluoro-nucleotide
  modified_base (7)..(7): 2'-OMe-nucleotide
  modified_base (8)..(8): 2'-OMe-nucleotide
  modified_base (9)..(9): 2'-OMe-nucleotide
  modified_base (10)..(10): 2'-OMe-nucleotide
  modified_base (11)..(11): 2'-OMe-nucleotide
  modified_base (12)..(12): 2'-OMe-nucleotide
  modified_base (13)..(13): 2'-OMe-nucleotide
  modified_base (14)..(14): 2'-fluoro-nucleotide
  modified_base (15)..(15): 2'-OMe-nucleotide
  modified_base (16)..(16): 2'-fluoro-nucleotide
  modified_base (17)..(17): 2'-OMe-nucleotide
  modified_base (18)..(18): 2'-OMe-nucleotide
  modified_base (19)..(19): 2'-OMe-nucleotide
  misc_feature (19)..(20): /note="phosphorothioate bond"
  modified_base (20)..(20): 2'-OMe-nucleotide
  misc_feature (20)..(21): /note="phosphorothioate bond"
  modified_base (21)..(21): 2'-OMe-nucleotide
ugccucgauaacuccguccaa

SEQ ID NO: 1530 - RNA, 21 nt, Artificial Sequence
  source: /note="Description of Artificial Sequence: Synthetic oligonucleotide"
  modified_base (1)..(1): 2'-OMe-nucleotide
  misc_feature (1)..(2): /note="phosphorothioate bond"
  modified_base (2)..(2): 2'-fluoro-nucleotide
  misc_feature (2)..(3): /note="phosphorothioate bond"
  modified_base (3)..(3): 2'-OMe-nucleotide
  modified_base (4)..(4): 2'-fluoro-nucleotide
  modified_base (5)..(5): 2'-OMe-nucleotide
  modified_base (6)..(6): 2'-OMe-nucleotide
  modified_base (7)..(7): 2'-OMe-nucleotide
  modified_base (8)..(8): 2'-fluoro-nucleotide
  modified_base (9)..(9): 2'-fluoro-nucleotide
  modified_base (10)..(10): 2'-OMe-nucleotide
  modified_base (11)..(11): 2'-OMe-nucleotide
  modified_base (12)..(12): 2'-OMe-nucleotide
  modified_base (13)..(13): 2'-OMe-nucleotide
  modified_base (14)..(14): 2'-fluoro-nucleotide
  modified_base (15)..(15): 2'-OMe-nucleotide
  modified_base (16)..(16): 2'-fluoro-nucleotide
  modified_base (17)..(17): 2'-OMe-nucleotide
  modified_base (18)..(18): 2'-OMe-nucleotide
  modified_base (19)..(19): 2'-OMe-nucleotide
  misc_feature (19)..(20): /note="phosphorothioate bond"
  modified_base (20)..(20): 2'-OMe-nucleotide
  misc_feature (20)..(21): /note="phosphorothioate bond"
  modified_base (21)..(21): 2'-OMe-nucleotide
ugccucgauaacuccguccaa

SEQ ID NO: 1531 - RNA, 21 nt, Artificial Sequence
  source: /note="Description of Artificial Sequence: Synthetic oligonucleotide"
  modified_base (1)..(1): 2'-OMe-nucleotide
  misc_feature (1)..(2): /note="phosphorothioate bond"
  modified_base (2)..(2): 2'-fluoro-nucleotide
  misc_feature (2)..(3): /note="phosphorothioate bond"
  modified_base (3)..(3): 2'-OMe-nucleotide
  modified_base (4)..(4): 2'-fluoro-nucleotide
  modified_base (5)..(5): 2'-OMe-nucleotide
  modified_base (6)..(6): 2'-OMe-nucleotide
  modified_base (7)..(7): 2'-OMe-nucleotide
  modified_base (8)..(8): 2'-OMe-nucleotide
  modified_base (9)..(9): 2'-fluoro-nucleotide
  modified_base (10)..(10): 2'-OMe-nucleotide
  modified_base (11)..(11): 2'-OMe-nucleotide
  modified_base (12)..(12): 2'-OMe-nucleotide
  modified_base (13)..(13): 2'-OMe-nucleotide
  modified_base (14)..(14): 2'-fluoro-nucleotide
  modified_base (15)..(15): 2'-OMe-nucleotide
  modified_base (16)..(16): 2'-fluoro-nucleotide
  modified_base (17)..(17): 2'-OMe-nucleotide
  modified_base (18)..(18): 2'-OMe-nucleotide
  modified_base (19)..(19): 2'-OMe-nucleotide
  misc_feature (19)..(20): /note="phosphorothioate bond"
  modified_base (20)..(20): 2'-OMe-nucleotide
  misc_feature (20)..(21): /note="phosphorothioate bond"
  modified_base (21)..(21): 2'-OMe-nucleotide
ugccucgauaacuccguccaa

SEQ ID NO: 1532 - DNA, 21 bp, Artificial Sequence
  source: /note="Description of Artificial Sequence: Synthetic oligonucleotide"
  source: /note="Description of Combined DNA/RNA Molecule: Synthetic oligonucleotide"
  modified_base (1)..(1): 2'-fluoro-nucleotide
  misc_feature (1)..(2): /note="phosphorothioate bond"
  modified_base (2)..(2): 2'-fluoro-nucleotide
  misc_feature (2)..(3): /note="phosphorothioate bond"
  modified_base (3)..(3): 2'-OMe-nucleotide
  modified_base (4)..(4): 2'-fluoro-nucleotide
  modified_base (5)..(5): 2'-OMe-nucleotide
  modified_base (6)..(6): 2'-fluoro-nucleotide
  modified_base (7)..(7): 2'-OMe-nucleotide
  modified_base (8)..(8): 2'-fluoro-nucleotide
  modified_base (9)..(9): 2'-OMe-nucleotide
  modified_base (10)..(10): 2'-fluoro-nucleotide
  modified_base (11)..(11): 2'-OMe-nucleotide
  modified_base (12)..(12): 2'-OMe-nucleotide
  modified_base (13)..(13): 2'-OMe-nucleotide
  modified_base (14)..(14): 2'-fluoro-nucleotide
  modified_base (15)..(15): 2'-OMe-nucleotide
  modified_base (16)..(16): 2'-fluoro-nucleotide
  modified_base (17)..(17): 2'-OMe-nucleotide
  modified_base (18)..(18): 2'-fluoro-nucleotide
  modified_base (19)..(19): 2'-OMe-nucleotide
  misc_feature (19)..(20): /note="phosphorothioate bond"
  modified_base (20)..(20): dT
  misc_feature (20)..(21): /note="phosphorothioate bond"
  modified_base (21)..(21): dT
ugccucgauaacuccgucctt

SEQ ID NO: 1533 - RNA, 21 nt, Artificial Sequence
  source: /note="Description of Artificial Sequence: Synthetic oligonucleotide"
  modified_base (1)..(1): 2'-OMe-nucleotide
  misc_feature (1)..(2): /note="phosphorothioate bond"
  modified_base (2)..(2): 2'-fluoro-nucleotide
  misc_feature (2)..(3): /note="phosphorothioate bond"
  modified_base (3)..(3): 2'-OMe-nucleotide
  modified_base (4)..(4): 2'-fluoro-nucleotide
  modified_base (5)..(5): 2'-OMe-nucleotide
  modified_base (6)..(6): 2'-OMe-nucleotide
  modified_base (7)..(7): 2'-OMe-nucleotide
  modified_base (8)..(8): 2'-OMe-nucleotide
  modified_base (9)..(9): 2'-OMe-nucleotide
  modified_base (10)..(10): 2'-OMe-nucleotide
  modified_base (11)..(11): 2'-OMe-nucleotide
  modified_base (12)..(12): 2'-OMe-nucleotide
  modified_base (13)..(13): 2'-OMe-nucleotide
  modified_base (14)..(14): 2'-fluoro-nucleotide
  modified_base (15)..(15): 2'-OMe-nucleotide
  modified_base (16)..(16): 2'-fluoro-nucleotide
  modified_base (17)..(17): 2'-OMe-nucleotide
  modified_base (18)..(18): 2'-OMe-nucleotide
  modified_base (19)..(19): 2'-OMe-nucleotide
  misc_feature (19)..(20): /note="phosphorothioate bond"
  modified_base (20)..(20): 2'-OMe-nucleotide
  misc_feature (20)..(21): /note="phosphorothioate bond"
  modified_base (21)..(21): 2'-OMe-nucleotide
ugccucgauaacuccguccaa

SEQ ID NO: 1534 - RNA, 21 nt, Artificial Sequence
  source: /note="Description of Artificial Sequence: Synthetic oligonucleotide"
  modified_base (1)..(1): 2'-OMe-nucleotide
  misc_feature (1)..(2): /note="phosphorothioate bond"
  modified_base (2)..(2): 2'-fluoro-nucleotide
  misc_feature (2)..(3): /note="phosphorothioate bond"
  modified_base (3)..(3): 2'-OMe-nucleotide
  modified_base (4)..(4): 2'-OMe-nucleotide
  modified_base (5)..(5): 2'-OMe-nucleotide
  modified_base (6)..(6): 2'-fluoro-nucleotide
  modified_base (7)..(7): 2'-OMe-nucleotide
  modified_base (8)..(8): 2'-OMe-nucleotide
  modified_base (9)..(9): 2'-OMe-nucleotide
  modified_base (10)..(10): 2'-OMe-nucleotide
  modified_base (11)..(11): 2'-OMe-nucleotide
  modified_base (12)..(12): 2'-OMe-nucleotide
  modified_base (13)..(13): 2'-OMe-nucleotide
  modified_base (14)..(14): 2'-fluoro-nucleotide
  modified_base (15)..(15): 2'-OMe-nucleotide
  modified_base (16)..(16): 2'-fluoro-nucleotide
  modified_base (17)..(17): 2'-OMe-nucleotide
  modified_base (18)..(18): 2'-OMe-nucleotide
  modified_base (19)..(19): 2'-OMe-nucleotide
  misc_feature (19)..(20): /note="phosphorothioate bond"
  modified_base (20)..(20): 2'-OMe-nucleotide
  misc_feature (20)..(21): /note="phosphorothioate bond"
  modified_base (21)..(21): 2'-OMe-nucleotide
ugccucgauaacuccguccaa

SEQ ID NO: 1535 - RNA, 21 nt, Artificial Sequence
  source: /note="Description of Artificial Sequence: Synthetic oligonucleotide"
  modified_base (1)..(1): 2'-OMe-nucleotide
  misc_feature (1)..(2): /note="phosphorothioate bond"
  modified_base (2)..(2): 2'-fluoro-nucleotide
  misc_feature (2)..(3): /note="phosphorothioate bond"
  modified_base (3)..(3): 2'-OMe-nucleotide
  modified_base (4)..(4): 2'-fluoro-nucleotide
  modified_base (5)..(5): 2'-OMe-nucleotide
  modified_base (6)..(6): 2'-OMe-nucleotide
  modified_base (7)..(7): 2'-OMe-nucleotide
  modified_base (8)..(8): 2'-fluoro-nucleotide
  modified_base (9)..(9): 2'-fluoro-nucleotide
  modified_base (10)..(10): 2'-OMe-nucleotide
  modified_base (11)..(11): 2'-OMe-nucleotide
  modified_base (12)..(12): 2'-OMe-nucleotide
  modified_base (13)..(13): 2'-OMe-nucleotide
  modified_base (14)..(14): 2'-fluoro-nucleotide
  modified_base (15)..(15): 2'-OMe-nucleotide
  modified_base (16)..(16): 2'-fluoro-nucleotide
  modified_base (17)..(17): 2'-OMe-nucleotide
  modified_base (18)..(18): 2'-OMe-nucleotide
  modified_base (19)..(19): 2'-OMe-nucleotide
  misc_feature (19)..(20): /note="phosphorothioate bond"
  modified_base (20)..(20): 2'-OMe-nucleotide
  misc_feature (20)..(21): /note="phosphorothioate bond"
  modified_base (21)..(21): 2'-OMe-nucleotide
ugccucgauaacuccguccaa

SEQ ID NO: 1536 - RNA, 21 nt, Artificial Sequence
  source: /note="Description of Artificial Sequence: Synthetic oligonucleotide"
  modified_base (1)..(1): 2'-OMe-nucleotide
  misc_feature (1)..(2): /note="phosphorothioate bond"
  modified_base (2)..(2): 2'-fluoro-nucleotide
  misc_feature (2)..(3): /note="phosphorothioate bond"
  modified_base (3)..(3): 2'-OMe-nucleotide
  modified_base (4)..(4): 2'-fluoro-nucleotide
  modified_base (5)..(5): 2'-OMe-nucleotide
  modified_base (6)..(6): 2'-OMe-nucleotide
  modified_base (7)..(7): 2'-OMe-nucleotide
  modified_base (8)..(8): 2'-OMe-nucleotide
  modified_base (9)..(9): 2'-fluoro-nucleotide
  modified_base (10)..(10): 2'-OMe-nucleotide
  modified_base (11)..(11): 2'-OMe-nucleotide
  modified_base (12)..(12): 2'-OMe-nucleotide
  modified_base (13)..(13): 2'-OMe-nucleotide
  modified_base (14)..(14): 2'-fluoro-nucleotide
  modified_base (15)..(15): 2'-OMe-nucleotide
  modified_base (16)..(16): 2'-fluoro-nucleotide
  modified_base (17)..(17): 2'-OMe-nucleotide
  modified_base (18)..(18): 2'-OMe-nucleotide
  modified_base (19)..(19): 2'-OMe-nucleotide
  misc_feature (19)..(20): /note="phosphorothioate bond"
  modified_base (20)..(20): 2'-OMe-nucleotide
  misc_feature (20)..(21): /note="phosphorothioate bond"
  modified_base (21)..(21): 2'-OMe-nucleotide
ugccucgauaacuccguccaa

SEQ ID NO: 1537 - DNA, 21 bp, Artificial Sequence
  source: /note="Description of Artificial Sequence: Synthetic oligonucleotide"
  source: /note="Description of Combined DNA/RNA Molecule: Synthetic oligonucleotide"
  modified_base (1)..(1): 2'-fluoro-nucleotide
  misc_feature (1)..(2): /note="phosphorothioate bond"
  modified_base (2)..(2): 2'-fluoro-nucleotide
  misc_feature (2)..(3): /note="phosphorothioate bond"
  modified_base (3)..(3): 2'-OMe-nucleotide
  modified_base (4)..(4): 2'-fluoro-nucleotide
  modified_base (5)..(5): 2'-OMe-nucleotide
  modified_base (6)..(6): 2'-fluoro-nucleotide
  modified_base (7)..(7): 2'-OMe-nucleotide
  modified_base (8)..(8): 2'-fluoro-nucleotide
  modified_base (9)..(9): 2'-OMe-nucleotide
  modified_base (10)..(10): 2'-fluoro-nucleotide
  modified_base (11)..(11): 2'-OMe-nucleotide
  modified_base (12)..(12): 2'-OMe-nucleotide
  modified_base (13)..(13): 2'-OMe-nucleotide
  modified_base (14)..(14): 2'-fluoro-nucleotide
  modified_base (15)..(15): 2'-OMe-nucleotide
  modified_base (16)..(16): 2'-fluoro-nucleotide
  modified_base (17)..(17): 2'-OMe-nucleotide
  modified_base (18)..(18): 2'-fluoro-nucleotide
  modified_base (19)..(19): 2'-OMe-nucleotide
  misc_feature (19)..(20): /note="phosphorothioate bond"
  modified_base (20)..(20): dT
  misc_feature (20)..(21): /note="phosphorothioate bond"
  modified_base (21)..(21): dT
ugccucgauaacuccgucctt

SEQ ID NO: 1538 - RNA, 21 nt, Artificial Sequence
  source: /note="Description of Artificial Sequence: Synthetic oligonucleotide"
  modified_base (1)..(1): 2'-OMe-nucleotide
  misc_feature (1)..(2): /note="phosphorothioate bond"
  modified_base (2)..(2): 2'-fluoro-nucleotide
  misc_feature (2)..(3): /note="phosphorothioate bond"
  modified_base (3)..(3): 2'-OMe-nucleotide
  modified_base (4)..(4): 2'-fluoro-nucleotide
  modified_base (5)..(5): 2'-OMe-nucleotide
  modified_base (6)..(6): 2'-OMe-nucleotide
  modified_base (7)..(7): 2'-OMe-nucleotide
  modified_base (8)..(8): 2'-OMe-nucleotide
  modified_base (9)..(9): 2'-OMe-nucleotide
  modified_base (10)..(10): 2'-OMe-nucleotide
  modified_base (11)..(11): 2'-OMe-nucleotide
  modified_base (12)..(12): 2'-OMe-nucleotide
  modified_base (13)..(13): 2'-OMe-nucleotide
  modified_base (14)..(14): 2'-fluoro-nucleotide
  modified_base (15)..(15): 2'-OMe-nucleotide
  modified_base (16)..(16): 2'-fluoro-nucleotide
  modified_base (17)..(17): 2'-OMe-nucleotide
  modified_base (18)..(18): 2'-OMe-nucleotide
  modified_base (19)..(19): 2'-OMe-nucleotide
  misc_feature (19)..(20): /note="phosphorothioate bond"
  modified_base (20)..(20): Locked nucleic acid (LNA) nucleotide
  misc_feature (20)..(21): /note="phosphorothioate bond"
  modified_base (21)..(21): Locked nucleic acid (LNA) nucleotide
ugccucgauaacuccguccaa

SEQ ID NO: 1539 - RNA, 21 nt, Artificial Sequence
  source: /note="Description of Artificial Sequence: Synthetic oligonucleotide"
  modified_base (1)..(1): 2'-OMe-nucleotide
  misc_feature (1)..(2): /note="phosphorothioate bond"
  modified_base (2)..(2): 2'-fluoro-nucleotide
  misc_feature (2)..(3): /note="phosphorothioate bond"
  modified_base (3)..(3): 2'-OMe-nucleotide
  modified_base (4)..(4): 2'-OMe-nucleotide
  modified_base (5)..(5): 2'-OMe-nucleotide
  modified_base (6)..(6): 2'-fluoro-nucleotide
  modified_base (7)..(7): 2'-OMe-nucleotide
  modified_base (8)..(8): 2'-OMe-nucleotide
  modified_base (9)..(9): 2'-OMe-nucleotide
  modified_base (10)..(10): 2'-OMe-nucleotide
  modified_base (11)..(11): 2'-OMe-nucleotide
  modified_base (12)..(12): 2'-OMe-nucleotide
  modified_base (13)..(13): 2'-OMe-nucleotide
  modified_base (14)..(14): 2'-fluoro-nucleotide
  modified_base (15)..(15): 2'-OMe-nucleotide
  modified_base (16)..(16): 2'-fluoro-nucleotide
  modified_base (17)..(17): 2'-OMe-nucleotide
  modified_base (18)..(18): 2'-OMe-nucleotide
  modified_base (19)..(19): 2'-OMe-nucleotide
  misc_feature (19)..(20): /note="phosphorothioate bond"
  modified_base (20)..(20): Locked nucleic acid (LNA) nucleotide
  misc_feature (20)..(21): /note="phosphorothioate bond"
  modified_base (21)..(21): Locked nucleic acid (LNA) nucleotide
ugccucgauaacuccguccaa

SEQ ID NO: 1540 - RNA, 21 nt, Artificial Sequence
  source: /note="Description of Artificial Sequence: Synthetic oligonucleotide"
  modified_base (1)..(1): 2'-OMe-nucleotide
  misc_feature (1)..(2): /note="phosphorothioate bond"
  modified_base (2)..(2): 2'-fluoro-nucleotide
  misc_feature (2)..(3): /note="phosphorothioate bond"
  modified_base (3)..(3): 2'-OMe-nucleotide
  modified_base (4)..(4): 2'-fluoro-nucleotide
  modified_base (5)..(5): 2'-OMe-nucleotide
  modified_base (6)..(6): 2'-OMe-nucleotide
  modified_base (7)..(7): 2'-OMe-nucleotide
  modified_base (8)..(8): 2'-fluoro-nucleotide
  modified_base (9)..(9): 2'-fluoro-nucleotide
  modified_base (10)..(10): 2'-OMe-nucleotide
  modified_base (11)..(11): 2'-OMe-nucleotide
  modified_base (12)..(12): 2'-OMe-nucleotide
  modified_base (13)..(13): 2'-OMe-nucleotide
  modified_base (14)..(14): 2'-fluoro-nucleotide
  modified_base (15)..(15): 2'-OMe-nucleotide
  modified_base (16)..(16): 2'-fluoro-nucleotide
  modified_base (17)..(17): 2'-OMe-nucleotide
  modified_base (18)..(18): 2'-OMe-nucleotide
  modified_base (19)..(19): 2'-OMe-nucleotide
  misc_feature (19)..(20): /note="phosphorothioate bond"
  modified_base (20)..(20): Locked nucleic acid (LNA) nucleotide
  misc_feature (20)..(21): /note="phosphorothioate bond"
  modified_base (21)..(21): Locked nucleic acid (LNA) nucleotide
ugccucgauaacuccguccaa

SEQ ID NO: 1541 - RNA, 21 nt, Artificial Sequence
  source: /note="Description of Artificial Sequence: Synthetic oligonucleotide"
  modified_base (1)..(1): 2'-OMe-nucleotide
  misc_feature (1)..(2): /note="phosphorothioate bond"
  modified_base (2)..(2): 2'-fluoro-nucleotide
  misc_feature (2)..(3): /note="phosphorothioate bond"
  modified_base (3)..(3): 2'-OMe-nucleotide
  modified_base (4)..(4): 2'-fluoro-nucleotide
  modified_base (5)..(5): 2'-OMe-nucleotide
  modified_base (6)..(6): 2'-OMe-nucleotide
  modified_base (7)..(7): 2'-OMe-nucleotide
  modified_base (8)..(8): 2'-OMe-nucleotide
  modified_base (9)..(9): 2'-fluoro-nucleotide
  modified_base (10)..(10): 2'-OMe-nucleotide
  modified_base (11)..(11): 2'-OMe-nucleotide
  modified_base (12)..(12): 2'-OMe-nucleotide
  modified_base (13)..(13): 2'-OMe-nucleotide
  modified_base (14)..(14): 2'-fluoro-nucleotide
  modified_base (15)..(15): 2'-OMe-nucleotide
  modified_base (16)..(16): 2'-fluoro-nucleotide
  modified_base (17)..(17): 2'-OMe-nucleotide
  modified_base (18)..(18): 2'-OMe-nucleotide
  modified_base (19)..(19): 2'-OMe-nucleotide
  misc_feature (19)..(20): /note="phosphorothioate bond"
  modified_base (20)..(20): Locked nucleic acid (LNA) nucleotide
  misc_feature (20)..(21): /note="phosphorothioate bond"
  modified_base (21)..(21): Locked nucleic acid (LNA) nucleotide
ugccucgauaacuccguccaa

SEQ ID NO: 1542 - RNA, 21 nt, Artificial Sequence
  source: /note="Description of Artificial Sequence: Synthetic oligonucleotide"
  modified_base (1)..(1): 2'-OMe-nucleotide
  misc_feature (1)..(2): /note="phosphorothioate bond"
  modified_base (2)..(2): 2'-fluoro-nucleotide
  misc_feature (2)..(3): /note="phosphorothioate bond"
  modified_base (3)..(3): 2'-OMe-nucleotide
  modified_base (4)..(4): 2'-fluoro-nucleotide
  modified_base (5)..(5): 2'-OMe-nucleotide
  modified_base (6)..(6): 2'-OMe-nucleotide
  modified_base (7)..(7): 2'-OMe-nucleotide
  modified_base (8)..(8): 2'-OMe-nucleotide
  modified_base (9)..(9): 2'-OMe-nucleotide
  modified_base (10)..(10): 2'-OMe-nucleotide
  modified_base (11)..(11): 2'-OMe-nucleotide
  modified_base (12)..(12): 2'-OMe-nucleotide
  modified_base (13)..(13): 2'-OMe-nucleotide
  modified_base (14)..(14): 2'-fluoro-nucleotide
  modified_base (15)..(15): 2'-OMe-nucleotide
  modified_base (16)..(16): 2'-fluoro-nucleotide
  modified_base (17)..(17): 2'-OMe-nucleotide
  modified_base (18)..(18): 2'-OMe-nucleotide
  modified_base (19)..(19): 2'-OMe-nucleotide
  misc_feature (19)..(20): /note="phosphorothioate bond"
  modified_base (20)..(20): 2'-OMe-nucleotide
  misc_feature (20)..(21): /note="phosphorothioate bond"
  modified_base (21)..(21): 2'-OMe-nucleotide
ugccucgauaacuccguccaa

SEQ ID NO: 1543 - RNA, 21 nt, Artificial Sequence
  source: /note="Description of Artificial Sequence: Synthetic oligonucleotide"
  modified_base (1)..(1): 2'-OMe-nucleotide
  misc_feature (1)..(2): /note="phosphorothioate bond"
  modified_base (2)..(2): 2'-fluoro-nucleotide
  misc_feature (2)..(3): /note="phosphorothioate bond"
  modified_base (3)..(3): 2'-OMe-nucleotide
  modified_base (4)..(4): 2'-OMe-nucleotide
  modified_base (5)..(5): 2'-OMe-nucleotide
  modified_base (6)..(6): 2'-fluoro-nucleotide
  modified_base (7)..(7): 2'-OMe-nucleotide
  modified_base (8)..(8): 2'-OMe-nucleotide
  modified_base (9)..(9): 2'-OMe-nucleotide
  modified_base (10)..(10): 2'-OMe-nucleotide
  modified_base (11)..(11): 2'-OMe-nucleotide
  modified_base (12)..(12): 2'-OMe-nucleotide
  modified_base (13)..(13): 2'-OMe-nucleotide
  modified_base (14)..(14): 2'-fluoro-nucleotide
  modified_base (15)..(15): 2'-OMe-nucleotide
  modified_base (16)..(16): 2'-fluoro-nucleotide
  modified_base (17)..(17): 2'-OMe-nucleotide
  modified_base (18)..(18): 2'-OMe-nucleotide
  modified_base (19)..(19): 2'-OMe-nucleotide
  misc_feature (19)..(20): /note="phosphorothioate bond"
  modified_base (20)..(20): 2'-OMe-nucleotide
  misc_feature (20)..(21): /note="phosphorothioate bond"
  modified_base (21)..(21): 2'-OMe-nucleotide
ugccucgauaacuccguccaa

SEQ ID NO: 1544 - RNA, 21 nt, Artificial Sequence
  source: /note="Description of Artificial Sequence: Synthetic oligonucleotide"
  modified_base (1)..(1): 2'-OMe-nucleotide
  misc_feature (1)..(2): /note="phosphorothioate bond"
  modified_base (2)..(2): 2'-fluoro-nucleotide
  misc_feature (2)..(3): /note="phosphorothioate bond"
  modified_base (3)..(3): 2'-OMe-nucleotide
  modified_base (4)..(4): 2'-fluoro-nucleotide
  modified_base (5)..(5): 2'-OMe-nucleotide
  modified_base (6)..(6): 2'-OMe-nucleotide
  modified_base (7)..(7): 2'-OMe-nucleotide
  modified_base (8)..(8): 2'-fluoro-nucleotide
  modified_base (9)..(9): 2'-fluoro-nucleotide
  modified_base (10)..(10): 2'-OMe-nucleotide
  modified_base (11)..(11): 2'-OMe-nucleotide
  modified_base (12)..(12): 2'-OMe-nucleotide
  modified_base (13)..(13): 2'-OMe-nucleotide
  modified_base (14)..(14): 2'-fluoro-nucleotide
  modified_base (15)..(15): 2'-OMe-nucleotide
  modified_base (16)..(16): 2'-fluoro-nucleotide
  modified_base (17)..(17): 2'-OMe-nucleotide
  modified_base (18)..(18): 2'-OMe-nucleotide
  modified_base (19)..(19): 2'-OMe-nucleotide
  misc_feature (19)..(20): /note="phosphorothioate bond"
  modified_base (20)..(20): 2'-OMe-nucleotide
  misc_feature (20)..(21): /note="phosphorothioate bond"
  modified_base (21)..(21): 2'-OMe-nucleotide
ugccucgauaacuccguccaa

SEQ ID NO: 1545 - RNA, 21 nt, Artificial Sequence
  source: /note="Description of Artificial Sequence: Synthetic oligonucleotide"
  modified_base (1)..(1): 2'-OMe-nucleotide
  misc_feature (1)..(2): /note="phosphorothioate bond"
  modified_base (2)..(2): 2'-fluoro-nucleotide
  misc_feature (2)..(3): /note="phosphorothioate bond"
  modified_base (3)..(3): 2'-OMe-nucleotide
  modified_base (4)..(4): 2'-fluoro-nucleotide
  modified_base (5)..(5): 2'-OMe-nucleotide
  modified_base (6)..(6): 2'-OMe-nucleotide
  modified_base (7)..(7): 2'-OMe-nucleotide
  modified_base (8)..(8): 2'-OMe-nucleotide
  modified_base (9)..(9): 2'-fluoro-nucleotide
  modified_base (10)..(10): 2'-OMe-nucleotide
  modified_base (11)..(11): 2'-OMe-nucleotide
  modified_base (12)..(12): 2'-OMe-nucleotide
  modified_base (13)..(13): 2'-OMe-nucleotide
  modified_base (14)..(14): 2'-fluoro-nucleotide
  modified_base (15)..(15): 2'-OMe-nucleotide
  modified_base (16)..(16): 2'-fluoro-nucleotide
  modified_base (17)..(17): 2'-OMe-nucleotide
  modified_base (18)..(18): 2'-OMe-nucleotide
  modified_base (19)..(19): 2'-OMe-nucleotide
  misc_feature (19)..(20): /note="phosphorothioate bond"
  modified_base (20)..(20): 2'-OMe-nucleotide
  misc_feature (20)..(21): /note="phosphorothioate bond"
  modified_base (21)..(21): 2'-OMe-nucleotide
ugccucgauaacuccguccaa

SEQ ID NO: 1546 - DNA, 21 bp, Artificial Sequence
  source: /note="Description of Artificial Sequence: Synthetic oligonucleotide"
  source: /note="Description of Combined DNA/RNA Molecule: Synthetic oligonucleotide"
  modified_base (1)..(1): 2'-fluoro-nucleotide
  misc_feature (1)..(2): /note="phosphorothioate bond"
  modified_base (2)..(2): 2'-fluoro-nucleotide
  misc_feature (2)..(3): /note="phosphorothioate bond"
  modified_base (3)..(3): 2'-OMe-nucleotide
  modified_base (4)..(4): 2'-fluoro-nucleotide
  modified_base (5)..(5): 2'-OMe-nucleotide
  modified_base (6)..(6): 2'-fluoro-nucleotide
  modified_base (7)..(7): 2'-OMe-nucleotide
  modified_base (8)..(8): 2'-fluoro-nucleotide
  modified_base (9)..(9): 2'-OMe-nucleotide
  modified_base (10)..(10): 2'-fluoro-nucleotide
  modified_base (11)..(11): 2'-OMe-nucleotide
  modified_base (12)..(12): 2'-OMe-nucleotide
  modified_base (13)..(13): 2'-OMe-nucleotide
  modified_base (14)..(14): 2'-fluoro-nucleotide
  modified_base (15)..(15): 2'-OMe-nucleotide
  modified_base (16)..(16): 2'-fluoro-nucleotide
  modified_base (17)..(17): 2'-OMe-nucleotide
  modified_base (18)..(18): 2'-fluoro-nucleotide
  modified_base (19)..(19): 2'-OMe-nucleotide
  misc_feature (19)..(20): /note="phosphorothioate bond"
  modified_base (20)..(20): dT
  misc_feature (20)..(21): /note="phosphorothioate bond"
  modified_base (21)..(21): dT
ugccucgauaacuccgucctt

SEQ ID NO: 1547 - RNA, 21 nt, Artificial Sequence
  source: /note="Description of Artificial Sequence: Synthetic oligonucleotide"
  modified_base (1)..(1): 2'-OMe-nucleotide
  misc_feature (1)..(2): /note="phosphorothioate bond"
  modified_base (2)..(2): 2'-fluoro-nucleotide
  misc_feature (2)..(3): /note="phosphorothioate bond"
  modified_base (3)..(3): 2'-OMe-nucleotide
  modified_base (4)..(4): 2'-fluoro-nucleotide
  modified_base (5)..(5): 2'-OMe-nucleotide
  modified_base (6)..(6): 2'-OMe-nucleotide
  modified_base (7)..(7): 2'-OMe-nucleotide
  modified_base (8)..(8): 2'-OMe-nucleotide
  modified_base (9)..(9): 2'-OMe-nucleotide
  modified_base (10)..(10): 2'-OMe-nucleotide
  modified_base (11)..(11): 2'-OMe-nucleotide
  modified_base (12)..(12): 2'-OMe-nucleotide
  modified_base (13)..(13): 2'-OMe-nucleotide
  modified_base (14)..(14): 2'-fluoro-nucleotide
  modified_base (15)..(15): 2'-OMe-nucleotide
  modified_base (16)..(16): 2'-fluoro-nucleotide
  modified_base (17)..(17): 2'-OMe-nucleotide
  modified_base (18)..(18): 2'-OMe-nucleotide
  modified_base (19)..(19): 2'-OMe-nucleotide
  misc_feature (19)..(20): /note="phosphorothioate bond"
  modified_base (20)..(20): Locked nucleic acid (LNA) nucleotide
  misc_feature (20)..(21): /note="phosphorothioate bond"
  modified_base (21)..(21): Locked nucleic acid (LNA) nucleotide
ugccucgauaacuccguccaa

SEQ ID NO: 1548 - RNA, 21 nt, Artificial Sequence
  source: /note="Description of Artificial Sequence: Synthetic oligonucleotide"
  modified_base (1)..(1): 2'-OMe-nucleotide
  misc_feature (1)..(2): /note="phosphorothioate bond"
  modified_base (2)..(2): 2'-fluoro-nucleotide
  misc_feature (2)..(3): /note="phosphorothioate bond"
  modified_base (3)..(3): 2'-OMe-nucleotide
  modified_base (4)..(4): 2'-OMe-nucleotide
  modified_base (5)..(5): 2'-OMe-nucleotide
  modified_base (6)..(6): 2'-fluoro-nucleotide
  modified_base (7)..(7): 2'-OMe-nucleotide
  modified_base (8)..(8): 2'-OMe-nucleotide
  modified_base (9)..(9): 2'-OMe-nucleotide
  modified_base (10)..(10): 2'-OMe-nucleotide
  modified_base (11)..(11): 2'-OMe-nucleotide
  modified_base (12)..(12): 2'-OMe-nucleotide
  modified_base (13)..(13): 2'-OMe-nucleotide
  modified_base (14)..(14): 2'-fluoro-nucleotide
  modified_base (15)..(15): 2'-OMe-nucleotide
  modified_base (16)..(16): 2'-fluoro-nucleotide
  modified_base (17)..(17): 2'-OMe-nucleotide
  modified_base (18)..(18): 2'-OMe-nucleotide
  modified_base (19)..(19): 2'-OMe-nucleotide
  misc_feature (19)..(20): /note="phosphorothioate bond"
  modified_base (20)..(20): Locked nucleic acid (LNA) nucleotide
  misc_feature (20)..(21): /note="phosphorothioate bond"
  modified_base (21)..(21): Locked nucleic acid (LNA) nucleotide
ugccucgauaacuccguccaa

SEQ ID NO: 1549 - RNA, 21 nt, Artificial Sequence
  source: /note="Description of Artificial Sequence: Synthetic oligonucleotide"
  modified_base (1)..(1): 2'-OMe-nucleotide
  misc_feature (1)..(2): /note="phosphorothioate bond"
  modified_base (2)..(2): 2'-fluoro-nucleotide
  misc_feature (2)..(3): /note="phosphorothioate bond"
  modified_base (3)..(3): 2'-OMe-nucleotide
  modified_base (4)..(4): 2'-fluoro-nucleotide
  modified_base (5)..(5): 2'-OMe-nucleotide
  modified_base (6)..(6): 2'-OMe-nucleotide
  modified_base (7)..(7): 2'-OMe-nucleotide
  modified_base (8)..(8): 2'-fluoro-nucleotide
  modified_base (9)..(9): 2'-fluoro-nucleotide
  modified_base (10)..(10): 2'-OMe-nucleotide
  modified_base (11)..(11): 2'-OMe-nucleotide
  modified_base (12)..(12): 2'-OMe-nucleotide
  modified_base (13)..(13): 2'-OMe-nucleotide
  modified_base (14)..(14): 2'-fluoro-nucleotide
  modified_base (15)..(15): 2'-OMe-nucleotide
  modified_base (16)..(16): 2'-fluoro-nucleotide
  modified_base (17)..(17): 2'-OMe-nucleotide
  modified_base (18)..(18): 2'-OMe-nucleotide
  modified_base (19)..(19): 2'-OMe-nucleotide
  misc_feature (19)..(20): /note="phosphorothioate bond"
  modified_base (20)..(20): Locked nucleic acid (LNA) nucleotide
  misc_feature (20)..(21): /note="phosphorothioate bond"
  modified_base (21)..(21): Locked nucleic acid (LNA) nucleotide
ugccucgauaacuccguccaa

SEQ ID NO: 1550 - RNA, 21 nt, Artificial Sequence
  source: /note="Description of Artificial Sequence: Synthetic oligonucleotide"
  modified_base (1)..(1): 2'-OMe-nucleotide
  misc_feature (1)..(2): /note="phosphorothioate bond"
  modified_base (2)..(2): 2'-fluoro-nucleotide
  misc_feature (2)..(3): /note="phosphorothioate bond"
  modified_base (3)..(3): 2'-OMe-nucleotide
  modified_base (4)..(4): 2'-fluoro-nucleotide
  modified_base (5)..(5): 2'-OMe-nucleotide
  modified_base (6)..(6): 2'-OMe-nucleotide
  modified_base (7)..(7): 2'-OMe-nucleotide
  modified_base (8)..(8): 2'-OMe-nucleotide
  modified_base (9)..(9): 2'-fluoro-nucleotide
  modified_base (10)..(10): 2'-OMe-nucleotide
  modified_base (11)..(11): 2'-OMe-nucleotide
  modified_base (12)..(12): 2'-OMe-nucleotide
  modified_base (13)..(13): 2'-OMe-nucleotide
  modified_base (14)..(14): 2'-fluoro-nucleotide
  modified_base (15)..(15): 2'-OMe-nucleotide
  modified_base (16)..(16): 2'-fluoro-nucleotide
  modified_base (17)..(17): 2'-OMe-nucleotide
  modified_base (18)..(18): 2'-OMe-nucleotide
  modified_base (19)..(19): 2'-OMe-nucleotide
  misc_feature (19)..(20): /note="phosphorothioate bond"
  modified_base (20)..(20): Locked nucleic acid (LNA) nucleotide
  misc_feature (20)..(21): /note="phosphorothioate bond"
  modified_base (21)..(21): Locked nucleic acid (LNA) nucleotide
ugccucgauaacuccguccaa

SEQ ID NO: 1551 - RNA, 21 nt, Artificial Sequence
  source: /note="Description of Artificial Sequence: Synthetic oligonucleotide"
  modified_base (1)..(1): 2'-OMe-nucleotide
  misc_feature (1)..(2): /note="phosphorothioate bond"
  modified_base (2)..(2): 2'-fluoro-nucleotide
  misc_feature (2)..(3): /note="phosphorothioate bond"
  modified_base (3)..(3): 2'-OMe-nucleotide
  modified_base (4)..(4): 2'-fluoro-nucleotide
  modified_base (5)..(5): 2'-OMe-nucleotide
  modified_base (6)..(6): 2'-OMe-nucleotide
  modified_base (7)..(7): 2'-OMe-nucleotide
  modified_base (8)..(8): 2'-OMe-nucleotide
  modified_base (9)..(9): 2'-OMe-nucleotide
  modified_base (10)..(10): 2'-OMe-nucleotide
  modified_base (11)..(11): 2'-OMe-nucleotide
  modified_base (12)..(12): 2'-OMe-nucleotide
  modified_base (13)..(13): 2'-OMe-nucleotide
  modified_base (14)..(14): 2'-fluoro-nucleotide
  modified_base (15)..(15): 2'-OMe-nucleotide
  modified_base (16)..(16): 2'-fluoro-nucleotide
  modified_base (17)..(17): 2'-OMe-nucleotide
  modified_base (18)..(18): 2'-OMe-nucleotide
  modified_base (19)..(19): 2'-OMe-nucleotide
  misc_feature (19)..(20): /note="phosphorothioate bond"
  modified_base (20)..(20): 2'-OMe-nucleotide
  misc_feature (20)..(21): /note="phosphorothioate bond"
  modified_base (21)..(21): 2'-OMe-nucleotide
ugccucgauaacuccguccaa

SEQ ID NO: 1552 - RNA, 21 nt, Artificial Sequence
  source: /note="Description of Artificial Sequence: Synthetic oligonucleotide"
  modified_base (1)..(1): 2'-OMe-nucleotide
  misc_feature (1)..(2): /note="phosphorothioate bond"
  modified_base (2)..(2): 2'-fluoro-nucleotide
  misc_feature (2)..(3): /note="phosphorothioate bond"
  modified_base (3)..(3): 2'-OMe-nucleotide
  modified_base (4)..(4): 2'-OMe-nucleotide
  modified_base (5)..(5): 2'-OMe-nucleotide
  modified_base (6)..(6): 2'-fluoro-nucleotide
  modified_base (7)..(7): 2'-OMe-nucleotide
  modified_base (8)..(8): 2'-OMe-nucleotide
  modified_base (9)..(9): 2'-OMe-nucleotide
  modified_base (10)..(10): 2'-OMe-nucleotide
  modified_base (11)..(11): 2'-OMe-nucleotide
  modified_base (12)..(12): 2'-OMe-nucleotide
  modified_base (13)..(13): 2'-OMe-nucleotide
  modified_base (14)..(14): 2'-fluoro-nucleotide
  modified_base (15)..(15): 2'-OMe-nucleotide
  modified_base (16)..(16): 2'-fluoro-nucleotide
  modified_base (17)..(17): 2'-OMe-nucleotide
  modified_base (18)..(18): 2'-OMe-nucleotide
  modified_base (19)..(19): 2'-OMe-nucleotide
  misc_feature (19)..(20): /note="phosphorothioate bond"
  modified_base (20)..(20): 2'-OMe-nucleotide
  misc_feature (20)..(21): /note="phosphorothioate bond"
  modified_base (21)..(21): 2'-OMe-nucleotide
ugccucgauaacuccguccaa

SEQ ID NO: 1553 - RNA, 21 nt, Artificial Sequence
  source: /note="Description of Artificial Sequence: Synthetic oligonucleotide"
  modified_base (1)..(1): 2'-OMe-nucleotide
  misc_feature (1)..(2): /note="phosphorothioate bond"
  modified_base (2)..(2): 2'-fluoro-nucleotide
  misc_feature (2)..(3): /note="phosphorothioate bond"
  modified_base (3)..(3): 2'-OMe-nucleotide
  modified_base (4)..(4): 2'-fluoro-nucleotide
  modified_base (5)..(5): 2'-OMe-nucleotide
  modified_base (6)..(6): 2'-OMe-nucleotide
  modified_base (7)..(7): 2'-OMe-nucleotide
  modified_base (8)..(8): 2'-fluoro-nucleotide
  modified_base (9)..(9): 2'-fluoro-nucleotide
  modified_base (10)..(10): 2'-OMe-nucleotide
  modified_base (11)..(11): 2'-OMe-nucleotide
  modified_base (12)..(12): 2'-OMe-nucleotide
  modified_base (13)..(13): 2'-OMe-nucleotide
  modified_base (14)..(14): 2'-fluoro-nucleotide
  modified_base (15)..(15): 2'-OMe-nucleotide
  modified_base (16)..(16): 2'-fluoro-nucleotide
  modified_base (17)..(17): 2'-OMe-nucleotide
  modified_base (18)..(18): 2'-OMe-nucleotide
  modified_base (19)..(19): 2'-OMe-nucleotide
  misc_feature (19)..(20): /note="phosphorothioate bond"
  modified_base (20)..(20): 2'-OMe-nucleotide
  misc_feature (20)..(21): /note="phosphorothioate bond"
  modified_base (21)..(21): 2'-OMe-nucleotide
ugccucgauaacuccguccaa

SEQ ID NO: 1554 - RNA, 21 nt, Artificial Sequence
  source: /note="Description of Artificial Sequence: Synthetic oligonucleotide"
  modified_base (1)..(1): 2'-OMe-nucleotide
  misc_feature (1)..(2): /note="phosphorothioate bond"
  modified_base (2)..(2): 2'-fluoro-nucleotide
  misc_feature (2)..(3): /note="phosphorothioate bond"
  modified_base (3)..(3): 2'-OMe-nucleotide
  modified_base (4)..(4): 2'-fluoro-nucleotide
  modified_base (5)..(5): 2'-OMe-nucleotide
  modified_base (6)..(6): 2'-OMe-nucleotide
  modified_base (7)..(7): 2'-OMe-nucleotide
  modified_base (8)..(8): 2'-OMe-nucleotide
  modified_base (9)..(9): 2'-fluoro-nucleotide
  modified_base (10)..(10): 2'-OMe-nucleotide
  modified_base (11)..(11): 2'-OMe-nucleotide
  modified_base (12)..(12): 2'-OMe-nucleotide
  modified_base (13)..(13): 2'-OMe-nucleotide
  modified_base (14)..(14): 2'-fluoro-nucleotide
  modified_base (15)..(15): 2'-OMe-nucleotide
  modified_base (16)..(16): 2'-fluoro-nucleotide
  modified_base (17)..(17): 2'-OMe-nucleotide
  modified_base (18)..(18): 2'-OMe-nucleotide
  modified_base (19)..(19): 2'-OMe-nucleotide
  misc_feature (19)..(20): /note="phosphorothioate bond"
  modified_base (20)..(20): 2'-OMe-nucleotide
  misc_feature (20)..(21): /note="phosphorothioate bond"
  modified_base (21)..(21): 2'-OMe-nucleotide
ugccucgauaacuccguccaa

SEQ ID NO: 1555 - DNA, 21 bp, Artificial Sequence
  source: /note="Description of Artificial Sequence: Synthetic oligonucleotide"
  source: /note="Description of Combined DNA/RNA Molecule: Synthetic oligonucleotide"
  modified_base (1)..(1): 2'-fluoro-nucleotide
  misc_feature (1)..(2): /note="phosphorothioate bond"
  modified_base (2)..(2): 2'-fluoro-nucleotide
  misc_feature (2)..(3): /note="phosphorothioate bond"
  modified_base (3)..(3): 2'-OMe-nucleotide
  modified_base (4)..(4): 2'-fluoro-nucleotide
  modified_base (5)..(5): 2'-OMe-nucleotide
  modified_base (6)..(6): 2'-fluoro-nucleotide
  modified_base (7)..(7): 2'-OMe-nucleotide
  modified_base (8)..(8): 2'-fluoro-nucleotide
  modified_base (9)..(9): 2'-OMe-nucleotide
  modified_base (10)..(10): 2'-fluoro-nucleotide
  modified_base (11)..(11): 2'-OMe-nucleotide
  modified_base (12)..(12): 2'-OMe-nucleotide
  modified_base (13)..(13): 2'-OMe-nucleotide
  modified_base (14)..(14): 2'-fluoro-nucleotide
  modified_base (15)..(15): 2'-OMe-nucleotide
  modified_base (16)..(16): 2'-fluoro-nucleotide
  modified_base (17)..(17): 2'-OMe-nucleotide
  modified_base (18)..(18): 2'-fluoro-nucleotide
  modified_base (19)..(19): 2'-OMe-nucleotide
  misc_feature (19)..(20): /note="phosphorothioate bond"
  modified_base (20)..(20): dT
  misc_feature (20)..(21): /note="phosphorothioate bond"
  modified_base (21)..(21): dT
ugccucgauaacuccgucctt

SEQ ID NO: 1556 - RNA, 21 nt, Artificial Sequence
  source: /note="Description of Artificial Sequence: Synthetic oligonucleotide"
  modified_base (1)..(1): 2'-OMe-nucleotide
  misc_feature (1)..(2): /note="phosphorothioate bond"
  modified_base (2)..(2): 2'-fluoro-nucleotide
  misc_feature (2)..(3): /note="phosphorothioate bond"
  modified_base (3)..(3): 2'-OMe-nucleotide
  modified_base (4)..(4): 2'-fluoro-nucleotide
  modified_base (5)..(5): 2'-OMe-nucleotide
  modified_base (6)..(6): 2'-OMe-nucleotide
  modified_base (7)..(7): 2'-OMe-nucleotide
  modified_base (8)..(8): 2'-OMe-nucleotide
  modified_base (9)..(9): 2'-OMe-nucleotide
  modified_base (10)..(10): 2'-OMe-nucleotide
  modified_base (11)..(11): 2'-OMe-nucleotide
  modified_base (12)..(12): 2'-OMe-nucleotide
  modified_base (13)..(13): 2'-OMe-nucleotide
  modified_base (14)..(14): 2'-fluoro-nucleotide
  modified_base (15)..(15): 2'-OMe-nucleotide
  modified_base (16)..(16): 2'-fluoro-nucleotide
  modified_base (17)..(17): 2'-OMe-nucleotide
  modified_base (18)..(18): 2'-OMe-nucleotide
  modified_base (19)..(19): 2'-OMe-nucleotide
  misc_feature (19)..(20): /note="phosphorothioate bond"
  modified_base (20)..(20): 2'-OMe-nucleotide
  misc_feature (20)..(21): /note="phosphorothioate bond"
  modified_base (21)..(21): 2'-OMe-nucleotide
ugccucgauaacuccguccaa

SEQ ID NO: 1557 - RNA, 21 nt, Artificial Sequence
  source: /note="Description of Artificial Sequence: Synthetic oligonucleotide"
  modified_base (1)..(1): 2'-OMe-nucleotide
  misc_feature (1)..(2): /note="phosphorothioate bond"
  modified_base (2)..(2): 2'-fluoro-nucleotide
  misc_feature (2)..(3): /note="phosphorothioate bond"
  modified_base (3)..(3): 2'-OMe-nucleotide
  modified_base (4)..(4): 2'-OMe-nucleotide
  modified_base (5)..(5): 2'-OMe-nucleotide
  modified_base (6)..(6): 2'-fluoro-nucleotide
  modified_base (7)..(7): 2'-OMe-nucleotide
  modified_base (8)..(8): 2'-OMe-nucleotide
  modified_base (9)..(9): 2'-OMe-nucleotide
  modified_base (10)..(10): 2'-OMe-nucleotide
  modified_base (11)..(11): 2'-OMe-nucleotide
  modified_base (12)..(12): 2'-OMe-nucleotide
  modified_base (13)..(13): 2'-OMe-nucleotide
  modified_base (14)..(14): 2'-fluoro-nucleotide
  modified_base (15)..(15): 2'-OMe-nucleotide
  modified_base (16)..(16): 2'-fluoro-nucleotide
  modified_base (17)..(17): 2'-OMe-nucleotide
  modified_base (18)..(18): 2'-OMe-nucleotide
  modified_base (19)..(19): 2'-OMe-nucleotide
  misc_feature (19)..(20): /note="phosphorothioate bond"
  modified_base (20)..(20): 2'-OMe-nucleotide
  misc_feature (20)..(21): /note="phosphorothioate bond"
  modified_base (21)..(21): 2'-OMe-nucleotide
ugccucgauaacuccguccaa

SEQ ID NO: 1558 - RNA, 21 nt, Artificial Sequence
  source: /note="Description of Artificial Sequence: Synthetic oligonucleotide"
  modified_base (1)..(1): 2'-OMe-nucleotide
  misc_feature (1)..(2): /note="phosphorothioate bond"
  modified_base (2)..(2): 2'-fluoro-nucleotide
  misc_feature (2)..(3): /note="phosphorothioate bond"
  modified_base (3)..(3): 2'-OMe-nucleotide
  modified_base (4)..(4): 2'-fluoro-nucleotide
  modified_base (5)..(5): 2'-OMe-nucleotide
  modified_base (6)..(6): 2'-OMe-nucleotide
  modified_base (7)..(7): 2'-OMe-nucleotide
  modified_base (8)..(8): 2'-fluoro-nucleotide
  modified_base (9)..(9): 2'-fluoro-nucleotide
  modified_base (10)..(10): 2'-OMe-nucleotide
  modified_base (11)..(11): 2'-OMe-nucleotide
  modified_base (12)..(12): 2'-OMe-nucleotide
  modified_base (13)..(13): 2'-OMe-nucleotide
  modified_base (14)..(14): 2'-fluoro-nucleotide
  modified_base (15)..(15): 2'-OMe-nucleotide
  modified_base (16)..(16): 2'-fluoro-nucleotide
  modified_base (17)..(17): 2'-OMe-nucleotide
  modified_base (18)..(18): 2'-OMe-nucleotide
  modified_base (19)..(19): 2'-OMe-nucleotide
  misc_feature (19)..(20): /note="phosphorothioate bond"
  modified_base (20)..(20): 2'-OMe-nucleotide
  misc_feature (20)..(21): /note="phosphorothioate bond"
  modified_base (21)..(21): 2'-OMe-nucleotide
ugccucgauaacuccguccaa

SEQ ID NO: 1559 - RNA, 21 nt, Artificial Sequence
  source: /note="Description of Artificial Sequence: Synthetic oligonucleotide"
  modified_base (1)..(1): 2'-OMe-nucleotide
  misc_feature (1)..(2): /note="phosphorothioate bond"
  modified_base (2)..(2): 2'-fluoro-nucleotide
  misc_feature (2)..(3): /note="phosphorothioate bond"
  modified_base (3)..(3): 2'-OMe-nucleotide
  modified_base (4)..(4): 2'-fluoro-nucleotide
  modified_base (5)..(5): 2'-OMe-nucleotide
  modified_base (6)..(6): 2'-OMe-nucleotide
  modified_base (7)..(7): 2'-OMe-nucleotide
  modified_base (8)..(8): 2'-OMe-nucleotide
  modified_base (9)..(9): 2'-fluoro-nucleotide
  modified_base (10)..(10): 2'-OMe-nucleotide
  modified_base (11)..(11): 2'-OMe-nucleotide
  modified_base (12)..(12): 2'-OMe-nucleotide
  modified_base (13)..(13): 2'-OMe-nucleotide
  modified_base (14)..(14): 2'-fluoro-nucleotide
  modified_base (15)..(15): 2'-OMe-nucleotide
  modified_base (16)..(16): 2'-fluoro-nucleotide
  modified_base (17)..(17): 2'-OMe-nucleotide
  modified_base (18)..(18): 2'-OMe-nucleotide
  modified_base (19)..(19): 2'-OMe-nucleotide
  misc_feature (19)..(20): /note="phosphorothioate bond"
  modified_base (20)..(20): 2'-OMe-nucleotide
  misc_feature (20)..(21): /note="phosphorothioate bond"
  modified_base (21)..(21): 2'-OMe-nucleotide
ugccucgauaacuccguccaa

SEQ ID NO: 1560 - DNA, 21 bp, Artificial Sequence
  source: /note="Description of Artificial Sequence: Synthetic oligonucleotide"
  source: /note="Description of Combined DNA/RNA Molecule: Synthetic oligonucleotide"
  modified_base (1)..(1): 2'-fluoro-nucleotide
  misc_feature (1)..(2): /note="phosphorothioate bond"
  modified_base (2)..(2): 2'-fluoro-nucleotide
  misc_feature (2)..(3): /note="phosphorothioate bond"
  modified_base (3)..(3): 2'-OMe-nucleotide
  modified_base (4)..(4): 2'-fluoro-nucleotide
  modified_base (5)..(5): 2'-OMe-nucleotide
  modified_base (6)..(6): 2'-fluoro-nucleotide
  modified_base (7)..(7): 2'-OMe-nucleotide
  modified_base (8)..(8): 2'-fluoro-nucleotide
  modified_base (9)..(9): 2'-OMe-nucleotide
  modified_base (10)..(10): 2'-fluoro-nucleotide
  modified_base (11)..(11): 2'-OMe-nucleotide
  modified_base (12)..(12): 2'-OMe-nucleotide
  modified_base (13)..(13): 2'-OMe-nucleotide
  modified_base (14)..(14): 2'-fluoro-nucleotide
  modified_base (15)..(15): 2'-OMe-nucleotide
  modified_base (16)..(16): 2'-fluoro-nucleotide
  modified_base (17)..(17): 2'-OMe-nucleotide
  modified_base (18)..(18): 2'-fluoro-nucleotide
  modified_base (19)..(19): 2'-OMe-nucleotide
  misc_feature (19)..(20): /note="phosphorothioate bond"
  modified_base (20)..(20): dT
  misc_feature (20)..(21): /note="phosphorothioate bond"
  modified_base (21)..(21): dT
ugccucgauaacuccgucctt

SEQ ID NO: 1561 - RNA, 21 nt, Artificial Sequence
  source: /note="Description of Artificial Sequence: Synthetic oligonucleotide"
  modified_base (1)..(1): 2'-OMe-nucleotide
  misc_feature (1)..(2): /note="phosphorothioate bond"
  modified_base (2)..(2): 2'-fluoro-nucleotide
  misc_feature (2)..(3): /note="phosphorothioate bond"
  modified_base (3)..(3): 2'-OMe-nucleotide
  modified_base (4)..(4): 2'-fluoro-nucleotide
  modified_base (5)..(5): 2'-OMe-nucleotide
  modified_base (6)..(6): 2'-OMe-nucleotide
  modified_base (7)..(7): 2'-OMe-nucleotide
  modified_base (8)..(8): 2'-OMe-nucleotide
  modified_base (9)..(9): 2'-OMe-nucleotide
  modified_base (10)..(10): 2'-OMe-nucleotide
  modified_base (11)..(11): 2'-OMe-nucleotide
  modified_base (12)..(12): 2'-OMe-nucleotide
  modified_base (13)..(13): 2'-OMe-nucleotide
  modified_base (14)..(14): 2'-fluoro-nucleotide
  modified_base (15)..(15): 2'-OMe-nucleotide
  modified_base (16)..(16): 2'-fluoro-nucleotide
  modified_base (17)..(17): 2'-OMe-nucleotide
  modified_base (18)..(18): 2'-OMe-nucleotide
  modified_base (19)..(19): 2'-OMe-nucleotide
  misc_feature (19)..(20): /note="phosphorothioate bond"
  modified_base (20)..(20): 2'-OMe-nucleotide
  misc_feature (20)..(21): /note="phosphorothioate bond"
  modified_base (21)..(21): 2'-OMe-nucleotide
gugccucgauaacucuggcaa

SEQ ID NO: 1562 - RNA, 21 nt, Artificial Sequence
  source: /note="Description of Artificial Sequence: Synthetic oligonucleotide"
  modified_base (1)..(1): 2'-OMe-nucleotide
  misc_feature (1)..(2): /note="phosphorothioate bond"
  modified_base (2)..(2): 2'-fluoro-nucleotide
  misc_feature (2)..(3): /note="phosphorothioate bond"
  modified_base (3)..(3): 2'-OMe-nucleotide
  modified_base (4)..(4): 2'-OMe-nucleotide
  modified_base (5)..(5): 2'-OMe-nucleotide
  modified_base (6)..(6): 2'-fluoro-nucleotide
  modified_base (7)..(7): 2'-OMe-nucleotide
  modified_base (8)..(8): 2'-OMe-nucleotide
  modified_base (9)..(9): 2'-OMe-nucleotide
  modified_base (10)..(10): 2'-OMe-nucleotide
  modified_base (11)..(11): 2'-OMe-nucleotide
  modified_base (12)..(12): 2'-OMe-nucleotide
  modified_base (13)..(13): 2'-OMe-nucleotide
  modified_base (14)..(14): 2'-fluoro-nucleotide
  modified_base (15)..(15): 2'-OMe-nucleotide
  modified_base (16)..(16): 2'-fluoro-nucleotide
  modified_base (17)..(17): 2'-OMe-nucleotide
  modified_base (18)..(18): 2'-OMe-nucleotide
  modified_base (19)..(19): 2'-OMe-nucleotide
  misc_feature (19)..(20): /note="phosphorothioate bond"
  modified_base (20)..(20): 2'-OMe-nucleotide
  misc_feature (20)..(21): /note="phosphorothioate bond"
  modified_base (21)..(21): 2'-OMe-nucleotide
gugccucgauaacucuggcaa

SEQ ID NO: 1563 - RNA, 21 nt, Artificial Sequence
  source: /note="Description of Artificial Sequence: Synthetic oligonucleotide"
  modified_base (1)..(1): 2'-OMe-nucleotide
  misc_feature (1)..(2): /note="phosphorothioate bond"
  modified_base (2)..(2): 2'-fluoro-nucleotide
  misc_feature (2)..(3): /note="phosphorothioate bond"
  modified_base (3)..(3): 2'-OMe-nucleotide
  modified_base (4)..(4): 2'-fluoro-nucleotide
  modified_base (5)..(5): 2'-OMe-nucleotide
  modified_base (6)..(6): 2'-OMe-nucleotide
  modified_base (7)..(7): 2'-OMe-nucleotide
  modified_base (8)..(8): 2'-fluoro-nucleotide
  modified_base (9)..(9): 2'-fluoro-nucleotide
  modified_base (10)..(10): 2'-OMe-nucleotide
  modified_base (11)..(11): 2'-OMe-nucleotide
  modified_base (12)..(12): 2'-OMe-nucleotide
  modified_base (13)..(13): 2'-OMe-nucleotide
  modified_base (14)..(14): 2'-fluoro-nucleotide
  modified_base (15)..(15): 2'-OMe-nucleotide
  modified_base (16)..(16): 2'-fluoro-nucleotide
  modified_base (17)..(17): 2'-OMe-nucleotide
  modified_base (18)..(18): 2'-OMe-nucleotide
  modified_base (19)..(19): 2'-OMe-nucleotide
  misc_feature (19)..(20): /note="phosphorothioate bond"
  modified_base (20)..(20): 2'-OMe-nucleotide
  misc_feature (20)..(21): /note="phosphorothioate bond"
  modified_base (21)..(21): 2'-OMe-nucleotide
gugccucgauaacucuggcaa

SEQ ID NO: 1564 - RNA, 21 nt, Artificial Sequence
  source: /note="Description of Artificial Sequence: Synthetic oligonucleotide"
  modified_base (1)..(1): 2'-OMe-nucleotide
  misc_feature (1)..(2): /note="phosphorothioate bond"
  modified_base (2)..(2): 2'-fluoro-nucleotide
  misc_feature (2)..(3): /note="phosphorothioate bond"
  modified_base (3)..(3): 2'-OMe-nucleotide
  modified_base (4)..(4): 2'-fluoro-nucleotide
  modified_base (5)..(5): 2'-OMe-nucleotide
  modified_base (6)..(6): 2'-OMe-nucleotide
  modified_base (7)..(7): 2'-OMe-nucleotide
  modified_base (8)..(8): 2'-OMe-nucleotide
  modified_base (9)..(9): 2'-fluoro-nucleotide
  modified_base (10)..(10): 2'-OMe-nucleotide
  modified_base (11)..(11): 2'-OMe-nucleotide
  modified_base (12)..(12): 2'-OMe-nucleotide
  modified_base (13)..(13): 2'-OMe-nucleotide
  modified_base (14)..(14): 2'-fluoro-nucleotide
  modified_base (15)..(15): 2'-OMe-nucleotide
  modified_base (16)..(16): 2'-fluoro-nucleotide
  modified_base (17)..(17): 2'-OMe-nucleotide
  modified_base (18)..(18): 2'-OMe-nucleotide
  modified_base (19)..(19): 2'-OMe-nucleotide
  misc_feature (19)..(20): /note="phosphorothioate bond"
  modified_base (20)..(20): 2'-OMe-nucleotide
  misc_feature (20)..(21): /note="phosphorothioate bond"
  modified_base (21)..(21): 2'-OMe-nucleotide
gugccucgauaacucuggcaa

SEQ ID NO: 1565 - DNA, 21 bp, Artificial Sequence
  source: /note="Description of Artificial Sequence: Synthetic oligonucleotide"
  source: /note="Description of Combined DNA/RNA Molecule: Synthetic oligonucleotide"
  modified_base (1)..(1): 2'-fluoro-nucleotide
  misc_feature (1)..(2): /note="phosphorothioate bond"
  modified_base (2)..(2): 2'-fluoro-nucleotide
  misc_feature (2)..(3): /note="phosphorothioate bond"
  modified_base (3)..(3): 2'-OMe-nucleotide
  modified_base (4)..(4): 2'-fluoro-nucleotide
  modified_base (5)..(5): 2'-OMe-nucleotide
  modified_base (6)..(6): 2'-fluoro-nucleotide
  modified_base (7)..(7): 2'-OMe-nucleotide
  modified_base (8)..(8): 2'-fluoro-nucleotide
  modified_base (9)..(9): 2'-OMe-nucleotide
  modified_base (10)..(10): 2'-fluoro-nucleotide
  modified_base (11)..(11): 2'-OMe-nucleotide
  modified_base (12)..(12): 2'-OMe-nucleotide
  modified_base (13)..(13): 2'-OMe-nucleotide
  modified_base (14)..(14): 2'-fluoro-nucleotide
  modified_base (15)..(15): 2'-OMe-nucleotide
  modified_base (16)..(16): 2'-fluoro-nucleotide
  modified_base (17)..(17): 2'-OMe-nucleotide
  modified_base (18)..(18): 2'-fluoro-nucleotide
  modified_base (19)..(19): 2'-OMe-nucleotide
  misc_feature (19)..(20): /note="phosphorothioate bond"
  modified_base (20)..(20): dT
  misc_feature (20)..(21): /note="phosphorothioate bond"
  modified_base (21)..(21): dT
gugccucgauaacucuggctt

SEQ ID NO: 1566 - RNA, 21 nt, Artificial Sequence
  source: /note="Description of Artificial Sequence: Synthetic oligonucleotide"
  modified_base (1)..(1): 2'-OMe-nucleotide
  misc_feature (1)..(2): /note="phosphorothioate bond"
  modified_base (2)..(2): 2'-fluoro-nucleotide
  misc_feature (2)..(3): /note="phosphorothioate bond"
  modified_base (3)..(3): 2'-OMe-nucleotide
  modified_base (4)..(4): 2'-fluoro-nucleotide
  modified_base (5)..(5): 2'-OMe-nucleotide
  modified_base (6)..(6): 2'-OMe-nucleotide
  modified_base (7)..(7): 2'-OMe-nucleotide
  modified_base (8)..(8): 2'-OMe-nucleotide
  modified_base (9)..(9): 2'-OMe-nucleotide
  modified_base (10)..(10): 2'-OMe-nucleotide
  modified_base (11)..(11): 2'-OMe-nucleotide
  modified_base (12)..(12): 2'-OMe-nucleotide
  modified_base (13)..(13): 2'-OMe-nucleotide
  modified_base (14)..(14): 2'-fluoro-nucleotide
  modified_base (15)..(15): 2'-OMe-nucleotide
  modified_base (16)..(16): 2'-fluoro-nucleotide
  modified_base (17)..(17): 2'-OMe-nucleotide
  modified_base (18)..(18): 2'-OMe-nucleotide
  modified_base (19)..(19): 2'-OMe-nucleotide
  misc_feature (19)..(20): /note="phosphorothioate bond"
  modified_base (20)..(20): 2'-OMe-nucleotide
  misc_feature (20)..(21): /note="phosphorothioate bond"
  modified_base (21)..(21): 2'-OMe-nucleotide
gugccucgauaacucuggcaa

SEQ ID NO: 1567 - RNA, 21 nt, Artificial Sequence
  source: /note="Description of Artificial Sequence: Synthetic oligonucleotide"
  modified_base (1)..(1): 2'-OMe-nucleotide
  misc_feature (1)..(2): /note="phosphorothioate bond"
  modified_base (2)..(2): 2'-fluoro-nucleotide
  misc_feature (2)..(3): /note="phosphorothioate bond"
  modified_base (3)..(3): 2'-OMe-nucleotide
  modified_base (4)..(4): 2'-OMe-nucleotide
  modified_base (5)..(5): 2'-OMe-nucleotide
  modified_base (6)..(6): 2'-fluoro-nucleotide
  modified_base (7)..(7): 2'-OMe-nucleotide
  modified_base (8)..(8): 2'-OMe-nucleotide
  modified_base (9)..(9): 2'-OMe-nucleotide
  modified_base (10)..(10): 2'-OMe-nucleotide
  modified_base (11)..(11): 2'-OMe-nucleotide
  modified_base (12)..(12): 2'-OMe-nucleotide
  modified_base (13)..(13): 2'-OMe-nucleotide
  modified_base (14)..(14): 2'-fluoro-nucleotide
  modified_base (15)..(15): 2'-OMe-nucleotide
  modified_base (16)..(16): 2'-fluoro-nucleotide
  modified_base (17)..(17): 2'-OMe-nucleotide
  modified_base (18)..(18): 2'-OMe-nucleotide
  modified_base (19)..(19): 2'-OMe-nucleotide
  misc_feature (19)..(20): /note="phosphorothioate bond"
  modified_base (20)..(20): 2'-OMe-nucleotide
  misc_feature (20)..(21): /note="phosphorothioate bond"
  modified_base (21)..(21): 2'-OMe-nucleotide
gugccucgauaacucuggcaa

SEQ ID NO: 1568 - RNA, 21 nt, Artificial Sequence
  source: /note="Description of Artificial Sequence: Synthetic oligonucleotide"
  modified_base (1)..(1): 2'-OMe-nucleotide
  misc_feature (1)..(2): /note="phosphorothioate bond"
  modified_base (2)..(2): 2'-fluoro-nucleotide
  misc_feature (2)..(3): /note="phosphorothioate bond"
  modified_base (3)..(3): 2'-OMe-nucleotide
  modified_base (4)..(4): 2'-fluoro-nucleotide
  modified_base (5)..(5): 2'-OMe-nucleotide
  modified_base (6)..(6): 2'-OMe-nucleotide
  modified_base (7)..(7): 2'-OMe-nucleotide
  modified_base (8)..(8): 2'-fluoro-nucleotide
  modified_base (9)..(9): 2'-fluoro-nucleotide
  modified_base (10)..(10): 2'-OMe-nucleotide
  modified_base (11)..(11): 2'-OMe-nucleotide
  modified_base (12)..(12): 2'-OMe-nucleotide
  modified_base (13)..(13): 2'-OMe-nucleotide
  modified_base (14)..(14): 2'-fluoro-nucleotide
  modified_base (15)..(15): 2'-OMe-nucleotide
  modified_base (16)..(16): 2'-fluoro-nucleotide
  modified_base (17)..(17): 2'-OMe-nucleotide
  modified_base (18)..(18): 2'-OMe-nucleotide
  modified_base (19)..(19): 2'-OMe-nucleotide
  misc_feature (19)..(20): /note="phosphorothioate bond"
  modified_base (20)..(20): 2'-OMe-nucleotide
  misc_feature (20)..(21): /note="phosphorothioate bond"
  modified_base (21)..(21): 2'-OMe-nucleotide
gugccucgauaacucuggcaa

SEQ ID NO: 1569 - RNA, 21 nt, Artificial Sequence
  source: /note="Description of Artificial Sequence: Synthetic oligonucleotide"
  modified_base (1)..(1): 2'-OMe-nucleotide
  misc_feature (1)..(2): /note="phosphorothioate bond"
  modified_base (2)..(2): 2'-fluoro-nucleotide
  misc_feature (2)..(3): /note="phosphorothioate bond"
  modified_base (3)..(3): 2'-OMe-nucleotide
  modified_base (4)..(4): 2'-fluoro-nucleotide
  modified_base (5)..(5): 2'-OMe-nucleotide
  modified_base (6)..(6): 2'-OMe-nucleotide
  modified_base (7)..(7): 2'-OMe-nucleotide
  modified_base (8)..(8): 2'-OMe-nucleotide
  modified_base (9)..(9): 2'-fluoro-nucleotide
  modified_base (10)..(10): 2'-OMe-nucleotide
  modified_base (11)..(11): 2'-OMe-nucleotide
  modified_base (12)..(12): 2'-OMe-nucleotide
  modified_base (13)..(13): 2'-OMe-nucleotide
  modified_base (14)..(14): 2'-fluoro-nucleotide
  modified_base (15)..(15): 2'-OMe-nucleotide
  modified_base (16)..(16): 2'-fluoro-nucleotide
  modified_base (17)..(17): 2'-OMe-nucleotide
  modified_base (18)..(18): 2'-OMe-nucleotide
  modified_base (19)..(19): 2'-OMe-nucleotide
  misc_feature (19)..(20): /note="phosphorothioate bond"
  modified_base (20)..(20): 2'-OMe-nucleotide
  misc_feature (20)..(21): /note="phosphorothioate bond"
  modified_base (21)..(21): 2'-OMe-nucleotide
gugccucgauaacucuggcaa

SEQ ID NO: 1570 - DNA, 21 bp, Artificial Sequence
  source: /note="Description of Artificial Sequence: Synthetic oligonucleotide"
  source: /note="Description of Combined DNA/RNA Molecule: Synthetic oligonucleotide"
  modified_base (1)..(1): 2'-fluoro-nucleotide
  misc_feature (1)..(2): /note="phosphorothioate bond"
  modified_base (2)..(2): 2'-fluoro-nucleotide
  misc_feature (2)..(3): /note="phosphorothioate bond"
  modified_base (3)..(3): 2'-OMe-nucleotide
  modified_base (4)..(4): 2'-fluoro-nucleotide
  modified_base (5)..(5): 2'-OMe-nucleotide
  modified_base (6)..(6): 2'-fluoro-nucleotide
  modified_base (7)..(7): 2'-OMe-nucleotide
  modified_base (8)..(8): 2'-fluoro-nucleotide
  modified_base (9)..(9): 2'-OMe-nucleotide
  modified_base (10)..(10): 2'-fluoro-nucleotide
  modified_base (11)..(11): 2'-OMe-nucleotide
  modified_base (12)..(12): 2'-OMe-nucleotide
  modified_base (13)..(13): 2'-OMe-nucleotide
  modified_base (14)..(14): 2'-fluoro-nucleotide
  modified_base (15)..(15): 2'-OMe-nucleotide
  modified_base (16)..(16): 2'-fluoro-nucleotide
  modified_base (17)..(17): 2'-OMe-nucleotide
  modified_base (18)..(18): 2'-fluoro-nucleotide
  modified_base (19)..(19): 2'-OMe-nucleotide
  misc_feature (19)..(20): /note="phosphorothioate bond"
  modified_base (20)..(20): dT
  misc_feature (20)..(21): /note="phosphorothioate bond"
  modified_base (21)..(21): dT
gugccucgauaacucuggctt

SEQ ID NO: 1571 - RNA, 21 nt, Artificial Sequence
  source: /note="Description of Artificial Sequence: Synthetic oligonucleotide"
  modified_base (1)..(1): 2'-OMe-nucleotide
  misc_feature (1)..(2): /note="phosphorothioate bond"
  modified_base (2)..(2): 2'-fluoro-nucleotide
  misc_feature (2)..(3): /note="phosphorothioate bond"
  modified_base (3)..(3): 2'-OMe-nucleotide
  modified_base (4)..(4): 2'-fluoro-nucleotide
  modified_base (5)..(5): 2'-OMe-nucleotide
  modified_base (6)..(6): 2'-OMe-nucleotide
  modified_base (7)..(7): 2'-OMe-nucleotide
  modified_base (8)..(8): 2'-OMe-nucleotide
  modified_base (9)..(9): 2'-OMe-nucleotide
  modified_base (10)..(10): 2'-OMe-nucleotide
  modified_base (11)..(11): 2'-OMe-nucleotide
  modified_base (12)..(12): 2'-OMe-nucleotide
  modified_base (13)..(13): 2'-OMe-nucleotide
  modified_base (14)..(14): 2'-fluoro-nucleotide
  modified_base (15)..(15): 2'-OMe-nucleotide
  modified_base (16)..(16): 2'-fluoro-nucleotide
  modified_base (17)..(17): 2'-OMe-nucleotide
  modified_base (18)..(18): 2'-OMe-nucleotide
  modified_base (19)..(19): 2'-OMe-nucleotide
  misc_feature (19)..(20): /note="phosphorothioate bond"
  modified_base (20)..(20): 2'-OMe-nucleotide
  misc_feature (20)..(21): /note="phosphorothioate bond"
  modified_base (21)..(21): 2'-OMe-nucleotide
gugccucgauaacucuggcaa

SEQ ID NO: 1572 - RNA, 21 nt, Artificial Sequence
  source: /note="Description of Artificial Sequence: Synthetic oligonucleotide"
  modified_base (1)..(1): 2'-OMe-nucleotide
  misc_feature (1)..(2): /note="phosphorothioate bond"
  modified_base (2)..(2): 2'-fluoro-nucleotide
  misc_feature (2)..(3): /note="phosphorothioate bond"
  modified_base (3)..(3): 2'-OMe-nucleotide
  modified_base (4)..(4): 2'-OMe-nucleotide
  modified_base (5)..(5): 2'-OMe-nucleotide
  modified_base (6)..(6): 2'-fluoro-nucleotide
  modified_base (7)..(7): 2'-OMe-nucleotide
  modified_base (8)..(8): 2'-OMe-nucleotide
  modified_base (9)..(9): 2'-OMe-nucleotide
  modified_base (10)..(10): 2'-OMe-nucleotide
  modified_base (11)..(11): 2'-OMe-nucleotide
  modified_base (12)..(12): 2'-OMe-nucleotide
  modified_base (13)..(13): 2'-OMe-nucleotide
  modified_base (14)..(14): 2'-fluoro-nucleotide
  modified_base (15)..(15): 2'-OMe-nucleotide
  modified_base (16)..(16): 2'-fluoro-nucleotide
  modified_base (17)..(17): 2'-OMe-nucleotide
  modified_base (18)..(18): 2'-OMe-nucleotide
  modified_base (19)..(19): 2'-OMe-nucleotide
  misc_feature (19)..(20): /note="phosphorothioate bond"
  modified_base (20)..(20): 2'-OMe-nucleotide
  misc_feature (20)..(21): /note="phosphorothioate bond"
  modified_base (21)..(21): 2'-OMe-nucleotide
gugccucgauaacucuggcaa

SEQ ID NO: 1573 - RNA, 21 nt, Artificial Sequence
  source: /note="Description of Artificial Sequence: Synthetic oligonucleotide"
  modified_base (1)..(1): 2'-OMe-nucleotide
  misc_feature (1)..(2): /note="phosphorothioate bond"
  modified_base (2)..(2): 2'-fluoro-nucleotide
  misc_feature (2)..(3): /note="phosphorothioate bond"
  modified_base (3)..(3): 2'-OMe-nucleotide
  modified_base (4)..(4): 2'-fluoro-nucleotide
  modified_base (5)..(5): 2'-OMe-nucleotide
  modified_base (6)..(6): 2'-OMe-nucleotide
  modified_base (7)..(7): 2'-OMe-nucleotide
  modified_base (8)..(8): 2'-fluoro-nucleotide
  modified_base (9)..(9): 2'-fluoro-nucleotide
  modified_base (10)..(10): 2'-OMe-nucleotide
  modified_base (11)..(11): 2'-OMe-nucleotide
  modified_base (12)..(12): 2'-OMe-nucleotide
  modified_base (13)..(13): 2'-OMe-nucleotide
  modified_base (14)..(14): 2'-fluoro-nucleotide
  modified_base (15)..(15): 2'-OMe-nucleotide
  modified_base (16)..(16): 2'-fluoro-nucleotide
  modified_base (17)..(17): 2'-OMe-nucleotide
  modified_base (18)..(18): 2'-OMe-nucleotide
  modified_base (19)..(19): 2'-OMe-nucleotide
  misc_feature (19)..(20): /note="phosphorothioate bond"
  modified_base (20)..(20): 2'-OMe-nucleotide
  misc_feature (20)..(21): /note="phosphorothioate bond"
  modified_base (21)..(21): 2'-OMe-nucleotide
gugccucgauaacucuggcaa

SEQ ID NO: 1574 - RNA, 21 nt, Artificial Sequence
  source: /note="Description of Artificial Sequence: Synthetic oligonucleotide"
  modified_base (1)..(1): 2'-OMe-nucleotide
  misc_feature (1)..(2): /note="phosphorothioate bond"
  modified_base (2)..(2): 2'-fluoro-nucleotide
  misc_feature (2)..(3): /note="phosphorothioate bond"
  modified_base (3)..(3): 2'-OMe-nucleotide
  modified_base (4)..(4): 2'-fluoro-nucleotide
  modified_base (5)..(5): 2'-OMe-nucleotide
  modified_base (6)..(6): 2'-OMe-nucleotide
  modified_base (7)..(7): 2'-OMe-nucleotide
  modified_base (8)..(8): 2'-OMe-nucleotide
  modified_base (9)..(9): 2'-fluoro-nucleotide
  modified_base (10)..(10): 2'-OMe-nucleotide
  modified_base (11)..(11): 2'-OMe-nucleotide
  modified_base (12)..(12): 2'-OMe-nucleotide
  modified_base (13)..(13): 2'-OMe-nucleotide
  modified_base (14)..(14): 2'-fluoro-nucleotide
  modified_base (15)..(15): 2'-OMe-nucleotide
  modified_base (16)..(16): 2'-fluoro-nucleotide
  modified_base (17)..(17): 2'-OMe-nucleotide
  modified_base (18)..(18): 2'-OMe-nucleotide
  modified_base (19)..(19): 2'-OMe-nucleotide
  misc_feature (19)..(20): /note="phosphorothioate bond"
  modified_base (20)..(20): 2'-OMe-nucleotide
  misc_feature (20)..(21): /note="phosphorothioate bond"
  modified_base (21)..(21): 2'-OMe-nucleotide
gugccucgauaacucuggcaa

SEQ ID NO: 1575 - DNA, 21 bp, Artificial Sequence
  source: /note="Description of Artificial Sequence: Synthetic oligonucleotide"
  source: /note="Description of Combined DNA/RNA Molecule: Synthetic oligonucleotide"
  modified_base (1)..(1): 2'-fluoro-nucleotide
  misc_feature (1)..(2): /note="phosphorothioate bond"
  modified_base (2)..(2): 2'-fluoro-nucleotide
  misc_feature (2)..(3): /note="phosphorothioate bond"
  modified_base (3)..(3): 2'-OMe-nucleotide
  modified_base (4)..(4): 2'-fluoro-nucleotide
  modified_base (5)..(5): 2'-OMe-nucleotide
  modified_base (6)..(6): 2'-fluoro-nucleotide
  modified_base (7)..(7): 2'-OMe-nucleotide
  modified_base (8)..(8): 2'-fluoro-nucleotide
  modified_base (9)..(9): 2'-OMe-nucleotide
  modified_base (10)..(10): 2'-fluoro-nucleotide
  modified_base (11)..(11): 2'-OMe-nucleotide
  modified_base (12)..(12): 2'-OMe-nucleotide
  modified_base (13)..(13): 2'-OMe-nucleotide
  modified_base (14)..(14): 2'-fluoro-nucleotide
  modified_base (15)..(15): 2'-OMe-nucleotide
  modified_base (16)..(16): 2'-fluoro-nucleotide
  modified_base (17)..(17): 2'-OMe-nucleotide
  modified_base (18)..(18): 2'-fluoro-nucleotide
  modified_base (19)..(19): 2'-OMe-nucleotide
  misc_feature (19)..(20): /note="phosphorothioate bond"
  modified_base (20)..(20): dT
  misc_feature (20)..(21): /note="phosphorothioate bond"
  modified_base (21)..(21): dT
gugccucgauaacucuggctt

SEQ ID NO: 1576 - RNA, 21 nt, Artificial Sequence
  source: /note="Description of Artificial Sequence: Synthetic oligonucleotide"
  modified_base (1)..(1): 2'-OMe-nucleotide
  misc_feature (1)..(2): /note="phosphorothioate bond"
  modified_base (2)..(2): 2'-fluoro-nucleotide
  misc_feature (2)..(3): /note="phosphorothioate bond"
  modified_base (3)..(3): 2'-OMe-nucleotide
  modified_base (4)..(4): 2'-fluoro-nucleotide
  modified_base (5)..(5): 2'-OMe-nucleotide
  modified_base (6)..(6): 2'-OMe-nucleotide
  modified_base (7)..(7): 2'-OMe-nucleotide
  modified_base (8)..(8): 2'-OMe-nucleotide
  modified_base (9)..(9): 2'-OMe-nucleotide
  modified_base (10)..(10): 2'-OMe-nucleotide
  modified_base (11)..(11): 2'-OMe-nucleotide
  modified_base (12)..(12): 2'-OMe-nucleotide
  modified_base (13)..(13): 2'-OMe-nucleotide
  modified_base (14)..(14): 2'-fluoro-nucleotide
  modified_base (15)..(15): 2'-OMe-nucleotide
  modified_base (16)..(16): 2'-fluoro-nucleotide
  modified_base (17)..(17): 2'-OMe-nucleotide
  modified_base (18)..(18): 2'-OMe-nucleotide
  modified_base (19)..(19): 2'-OMe-nucleotide
  misc_feature (19)..(20): /note="phosphorothioate bond"
  modified_base (20)..(20): Locked nucleic acid (LNA) nucleotide
  misc_feature (20)..(21): /note="phosphorothioate bond"
  modified_base (21)..(21): Locked nucleic acid (LNA) nucleotide
gugccucgauaacucuggcaa

SEQ ID NO: 1577 - RNA, 21 nt, Artificial Sequence
  source: /note="Description of Artificial Sequence: Synthetic oligonucleotide"
  modified_base (1)..(1): 2'-OMe-nucleotide
  misc_feature (1)..(2): /note="phosphorothioate bond"
  modified_base (2)..(2): 2'-fluoro-nucleotide
  misc_feature (2)..(3): /note="phosphorothioate bond"
  modified_base (3)..(3): 2'-OMe-nucleotide
  modified_base (4)..(4): 2'-OMe-nucleotide
  modified_base (5)..(5): 2'-OMe-nucleotide
  modified_base (6)..(6): 2'-fluoro-nucleotide
  modified_base (7)..(7): 2'-OMe-nucleotide
  modified_base (8)..(8): 2'-OMe-nucleotide
  modified_base (9)..(9): 2'-OMe-nucleotide
  modified_base (10)..(10): 2'-OMe-nucleotide
  modified_base (11)..(11): 2'-OMe-nucleotide
  modified_base (12)..(12): 2'-OMe-nucleotide
  modified_base (13)..(13): 2'-OMe-nucleotide
  modified_base (14)..(14): 2'-fluoro-nucleotide
  modified_base (15)..(15): 2'-OMe-nucleotide
  modified_base (16)..(16): 2'-fluoro-nucleotide
  modified_base (17)..(17): 2'-OMe-nucleotide
  modified_base (18)..(18): 2'-OMe-nucleotide
  modified_base (19)..(19): 2'-OMe-nucleotide
  misc_feature (19)..(20): /note="phosphorothioate bond"
  modified_base (20)..(20): Locked nucleic acid (LNA) nucleotide
  misc_feature (20)..(21): /note="phosphorothioate bond"
  modified_base (21)..(21): Locked nucleic acid (LNA) nucleotide
gugccucgauaacucuggcaa

SEQ ID NO: 1578 - RNA, 21 nt, Artificial Sequence
  source: /note="Description of Artificial Sequence: Synthetic oligonucleotide"
  modified_base (1)..(1): 2'-OMe-nucleotide
  misc_feature (1)..(2): /note="phosphorothioate bond"
  modified_base (2)..(2): 2'-fluoro-nucleotide
  misc_feature (2)..(3): /note="phosphorothioate bond"
  modified_base (3)..(3): 2'-OMe-nucleotide
  modified_base (4)..(4): 2'-fluoro-nucleotide
  modified_base (5)..(5): 2'-OMe-nucleotide
  modified_base (6)..(6): 2'-OMe-nucleotide
  modified_base (7)..(7): 2'-OMe-nucleotide
  modified_base (8)..(8): 2'-fluoro-nucleotide
  modified_base (9)..(9): 2'-fluoro-nucleotide
  modified_base (10)..(10): 2'-OMe-nucleotide
  modified_base (11)..(11): 2'-OMe-nucleotide
  modified_base (12)..(12): 2'-OMe-nucleotide
  modified_base (13)..(13): 2'-OMe-nucleotide
  modified_base (14)..(14): 2'-fluoro-nucleotide
  modified_base (15)..(15): 2'-OMe-nucleotide
  modified_base (16)..(16): 2'-fluoro-nucleotide
  modified_base (17)..(17): 2'-OMe-nucleotide
  modified_base (18)..(18): 2'-OMe-nucleotide
  modified_base (19)..(19): 2'-OMe-nucleotide
  misc_feature (19)..(20): /note="phosphorothioate bond"
  modified_base (20)..(20): Locked nucleic acid (LNA) nucleotide
  misc_feature (20)..(21): /note="phosphorothioate bond"
  modified_base (21)..(21): Locked nucleic acid (LNA) nucleotide
gugccucgauaacucuggcaa

SEQ ID NO: 1579 - RNA, 21 nt, Artificial Sequence
  source: /note="Description of Artificial Sequence: Synthetic oligonucleotide"
  modified_base (1)..(1): 2'-OMe-nucleotide
  misc_feature (1)..(2): /note="phosphorothioate bond"
  modified_base (2)..(2): 2'-fluoro-nucleotide
  misc_feature (2)..(3): /note="phosphorothioate bond"
  modified_base (3)..(3): 2'-OMe-nucleotide
  modified_base (4)..(4): 2'-fluoro-nucleotide
  modified_base (5)..(5): 2'-OMe-nucleotide
  modified_base (6)..(6): 2'-OMe-nucleotide
  modified_base (7)..(7): 2'-OMe-nucleotide
  modified_base (8)..(8): 2'-OMe-nucleotide
  modified_base (9)..(9): 2'-fluoro-nucleotide
  modified_base (10)..(10): 2'-OMe-nucleotide
  modified_base (11)..(11): 2'-OMe-nucleotide
  modified_base (12)..(12): 2'-OMe-nucleotide
  modified_base (13)..(13): 2'-OMe-nucleotide
  modified_base (14)..(14): 2'-fluoro-nucleotide
  modified_base (15)..(15): 2'-OMe-nucleotide
  modified_base (16)..(16): 2'-fluoro-nucleotide
  modified_base (17)..(17): 2'-OMe-nucleotide
  modified_base (18)..(18): 2'-OMe-nucleotide
  modified_base (19)..(19): 2'-OMe-nucleotide
  misc_feature (19)..(20): /note="phosphorothioate bond"
  modified_base (20)..(20): Locked nucleic acid (LNA) nucleotide
  misc_feature (20)..(21): /note="phosphorothioate bond"
  modified_base (21)..(21): Locked nucleic acid (LNA) nucleotide
gugccucgauaacucuggcaa

SEQ ID NO: 1580 - RNA, 21 nt, Artificial Sequence
  source: /note="Description of Artificial Sequence: Synthetic oligonucleotide"
  modified_base (1)..(1): 2'-OMe-nucleotide
  misc_feature (1)..(2): /note="phosphorothioate bond"
  modified_base (2)..(2): 2'-fluoro-nucleotide
  misc_feature (2)..(3): /note="phosphorothioate bond"
  modified_base (3)..(3): 2'-OMe-nucleotide
  modified_base (4)..(4): 2'-fluoro-nucleotide
  modified_base (5)..(5): 2'-OMe-nucleotide
  modified_base (6)..(6): 2'-OMe-nucleotide
  modified_base (7)..(7): 2'-OMe-nucleotide
  modified_base (8)..(8): 2'-OMe-nucleotide
  modified_base (9)..(9): 2'-OMe-nucleotide
  modified_base (10)..(10): 2'-OMe-nucleotide
  modified_base (11)..(11): 2'-OMe-nucleotide
  modified_base (12)..(12): 2'-OMe-nucleotide
  modified_base (13)..(13): 2'-OMe-nucleotide
  modified_base (14)..(14): 2'-fluoro-nucleotide
  modified_base (15)..(15): 2'-OMe-nucleotide
  modified_base (16)..(16): 2'-fluoro-nucleotide
  modified_base (17)..(17): 2'-OMe-nucleotide
  modified_base (18)..(18): 2'-OMe-nucleotide
  modified_base (19)..(19): 2'-OMe-nucleotide
  misc_feature (19)..(20): /note="phosphorothioate bond"
  modified_base (20)..(20): 2'-OMe-nucleotide
  misc_feature (20)..(21): /note="phosphorothioate bond"
  modified_base (21)..(21): 2'-OMe-nucleotide
gugccucgauaacucuggcaa

SEQ ID NO: 1581 - RNA, 21 nt, Artificial Sequence
  source: /note="Description of Artificial Sequence: Synthetic oligonucleotide"
  modified_base (1)..(1): 2'-OMe-nucleotide
  misc_feature (1)..(2): /note="phosphorothioate bond"
  modified_base (2)..(2): 2'-fluoro-nucleotide
  misc_feature (2)..(3): /note="phosphorothioate bond"
  modified_base (3)..(3): 2'-OMe-nucleotide
  modified_base (4)..(4): 2'-OMe-nucleotide
  modified_base (5)..(5): 2'-OMe-nucleotide
  modified_base (6)..(6): 2'-fluoro-nucleotide
  modified_base (7)..(7): 2'-OMe-nucleotide
  modified_base (8)..(8): 2'-OMe-nucleotide
  modified_base (9)..(9): 2'-OMe-nucleotide
  modified_base (10)..(10): 2'-OMe-nucleotide
  modified_base (11)..(11): 2'-OMe-nucleotide
  modified_base (12)..(12): 2'-OMe-nucleotide
  modified_base (13)..(13): 2'-OMe-nucleotide
  modified_base (14)..(14): 2'-fluoro-nucleotide
  modified_base (15)..(15): 2'-OMe-nucleotide
  modified_base (16)..(16): 2'-fluoro-nucleotide
  modified_base (17)..(17): 2'-OMe-nucleotide
  modified_base (18)..(18): 2'-OMe-nucleotide
  modified_base (19)..(19): 2'-OMe-nucleotide
  misc_feature (19)..(20): /note="phosphorothioate bond"
  modified_base (20)..(20): 2'-OMe-nucleotide
  misc_feature (20)..(21): /note="phosphorothioate bond"
  modified_base (21)..(21): 2'-OMe-nucleotide
gugccucgauaacucuggcaa

SEQ ID NO: 1582 - RNA, 21 nt, Artificial Sequence
  source: /note="Description of Artificial Sequence: Synthetic oligonucleotide"
  modified_base (1)..(1): 2'-OMe-nucleotide
  misc_feature (1)..(2): /note="phosphorothioate bond"
  modified_base (2)..(2): 2'-fluoro-nucleotide
  misc_feature (2)..(3): /note="phosphorothioate bond"
  modified_base (3)..(3): 2'-OMe-nucleotide
  modified_base (4)..(4): 2'-fluoro-nucleotide
  modified_base (5)..(5): 2'-OMe-nucleotide
  modified_base (6)..(6): 2'-OMe-nucleotide
  modified_base (7)..(7): 2'-OMe-nucleotide
  modified_base (8)..(8): 2'-fluoro-nucleotide
  modified_base (9)..(9): 2'-fluoro-nucleotide
  modified_base (10)..(10): 2'-OMe-nucleotide
  modified_base (11)..(11): 2'-OMe-nucleotide
  modified_base (12)..(12): 2'-OMe-nucleotide
  modified_base (13)..(13): 2'-OMe-nucleotide
  modified_base (14)..(14): 2'-fluoro-nucleotide
  modified_base (15)..(15): 2'-OMe-nucleotide
  modified_base (16)..(16): 2'-fluoro-nucleotide
  modified_base (17)..(17): 2'-OMe-nucleotide
  modified_base (18)..(18): 2'-OMe-nucleotide
  modified_base (19)..(19): 2'-OMe-nucleotide
  misc_feature (19)..(20): /note="phosphorothioate bond"
  modified_base (20)..(20): 2'-OMe-nucleotide
  misc_feature (20)..(21): /note="phosphorothioate bond"
  modified_base (21)..(21): 2'-OMe-nucleotide
gugccucgauaacucuggcaa

SEQ ID NO: 1583 - RNA, 21 nt, Artificial Sequence
  source: /note="Description of Artificial Sequence: Synthetic oligonucleotide"
  modified_base (1)..(1): 2'-OMe-nucleotide
  misc_feature (1)..(2): /note="phosphorothioate bond"
  modified_base (2)..(2): 2'-fluoro-nucleotide
  misc_feature (2)..(3): /note="phosphorothioate bond"
  modified_base (3)..(3): 2'-OMe-nucleotide
  modified_base (4)..(4): 2'-fluoro-nucleotide
  modified_base (5)..(5): 2'-OMe-nucleotide
  modified_base (6)..(6): 2'-OMe-nucleotide
  modified_base (7)..(7): 2'-OMe-nucleotide
  modified_base (8)..(8): 2'-OMe-nucleotide
  modified_base (9)..(9): 2'-fluoro-nucleotide
  modified_base (10)..(10): 2'-OMe-nucleotide
  modified_base (11)..(11): 2'-OMe-nucleotide
  modified_base (12)..(12): 2'-OMe-nucleotide
  modified_base (13)..(13): 2'-OMe-nucleotide
  modified_base (14)..(14): 2'-fluoro-nucleotide
  modified_base (15)..(15): 2'-OMe-nucleotide
  modified_base (16)..(16): 2'-fluoro-nucleotide
  modified_base (17)..(17): 2'-OMe-nucleotide
  modified_base (18)..(18): 2'-OMe-nucleotide
  modified_base (19)..(19): 2'-OMe-nucleotide
  misc_feature (19)..(20): /note="phosphorothioate bond"
  modified_base (20)..(20): 2'-OMe-nucleotide
  misc_feature (20)..(21): /note="phosphorothioate bond"
  modified_base (21)..(21): 2'-OMe-nucleotide
gugccucgauaacucuggcaa

SEQ ID NO: 1584 - DNA, 21 bp, Artificial Sequence
  source: /note="Description of Artificial Sequence: Synthetic oligonucleotide"
  source: /note="Description of Combined DNA/RNA Molecule: Synthetic oligonucleotide"
  modified_base (1)..(1): 2'-fluoro-nucleotide
  misc_feature (1)..(2): /note="phosphorothioate bond"
  modified_base (2)..(2): 2'-fluoro-nucleotide
  misc_feature (2)..(3): /note="phosphorothioate bond"
  modified_base (3)..(3): 2'-OMe-nucleotide
  modified_base (4)..(4): 2'-fluoro-nucleotide
  modified_base (5)..(5): 2'-OMe-nucleotide
  modified_base (6)..(6): 2'-fluoro-nucleotide
  modified_base (7)..(7): 2'-OMe-nucleotide
  modified_base (8)..(8): 2'-fluoro-nucleotide
  modified_base (9)..(9): 2'-OMe-nucleotide
  modified_base (10)..(10): 2'-fluoro-nucleotide
  modified_base (11)..(11): 2'-OMe-nucleotide
  modified_base (12)..(12): 2'-OMe-nucleotide
  modified_base (13)..(13): 2'-OMe-nucleotide
  modified_base (14)..(14): 2'-fluoro-nucleotide
  modified_base (15)..(15): 2'-OMe-nucleotide
  modified_base (16)..(16): 2'-fluoro-nucleotide
  modified_base (17)..(17): 2'-OMe-nucleotide
  modified_base (18)..(18): 2'-fluoro-nucleotide
  modified_base (19)..(19): 2'-OMe-nucleotide
  misc_feature (19)..(20): /note="phosphorothioate bond"
  modified_base (20)..(20): dT
  misc_feature (20)..(21): /note="phosphorothioate bond"
  modified_base (21)..(21): dT
gugccucgauaacucuggctt

SEQ ID NO: 1585 - RNA, 21 nt, Artificial Sequence
  source: /note="Description of Artificial Sequence: Synthetic oligonucleotide"
  modified_base (1)..(1): 2'-OMe-nucleotide
  misc_feature (1)..(2): /note="phosphorothioate bond"
  modified_base (2)..(2): 2'-fluoro-nucleotide
  misc_feature (2)..(3): /note="phosphorothioate bond"
  modified_base (3)..(3): 2'-OMe-nucleotide
  modified_base (4)..(4): 2'-fluoro-nucleotide
  modified_base (5)..(5): 2'-OMe-nucleotide
  modified_base (6)..(6): 2'-OMe-nucleotide
  modified_base (7)..(7): 2'-OMe-nucleotide
  modified_base (8)..(8): 2'-OMe-nucleotide
  modified_base (9)..(9): 2'-OMe-nucleotide
  modified_base (10)..(10): 2'-OMe-nucleotide
  modified_base (11)..(11): 2'-OMe-nucleotide
  modified_base (12)..(12): 2'-OMe-nucleotide
  modified_base (13)..(13): 2'-OMe-nucleotide
  modified_base (14)..(14): 2'-fluoro-nucleotide
  modified_base (15)..(15): 2'-OMe-nucleotide
  modified_base (16)..(16): 2'-fluoro-nucleotide
  modified_base (17)..(17): 2'-OMe-nucleotide
  modified_base (18)..(18): 2'-OMe-nucleotide
  modified_base (19)..(19): 2'-OMe-nucleotide
  misc_feature (19)..(20): /note="phosphorothioate bond"
  modified_base (20)..(20): Locked nucleic acid (LNA) nucleotide
  misc_feature (20)..(21): /note="phosphorothioate bond"
  modified_base (21)..(21): Locked nucleic acid (LNA) nucleotide
gugccucgauaacucuggcaa

SEQ ID NO: 1586 - RNA, 21 nt, Artificial Sequence
  source: /note="Description of Artificial Sequence: Synthetic oligonucleotide"
  modified_base (1)..(1): 2'-OMe-nucleotide
  misc_feature (1)..(2): /note="phosphorothioate bond"
  modified_base (2)..(2): 2'-fluoro-nucleotide
  misc_feature (2)..(3): /note="phosphorothioate bond"
  modified_base (3)..(3): 2'-OMe-nucleotide
  modified_base (4)..(4): 2'-OMe-nucleotide
  modified_base (5)..(5): 2'-OMe-nucleotide
  modified_base (6)..(6): 2'-fluoro-nucleotide
  modified_base (7)..(7): 2'-OMe-nucleotide
  modified_base (8)..(8): 2'-OMe-nucleotide
  modified_base (9)..(9): 2'-OMe-nucleotide
  modified_base (10)..(10): 2'-OMe-nucleotide
  modified_base (11)..(11): 2'-OMe-nucleotide
  modified_base (12)..(12): 2'-OMe-nucleotide
  modified_base (13)..(13): 2'-OMe-nucleotide
  modified_base (14)..(14): 2'-fluoro-nucleotide
  modified_base (15)..(15): 2'-OMe-nucleotide
  modified_base (16)..(16): 2'-fluoro-nucleotide
  modified_base (17)..(17): 2'-OMe-nucleotide
  modified_base (18)..(18): 2'-OMe-nucleotide
  modified_base (19)..(19): 2'-OMe-nucleotide
  misc_feature (19)..(20): /note="phosphorothioate bond"
  modified_base (20)..(20): Locked nucleic acid (LNA) nucleotide
  misc_feature (20)..(21): /note="phosphorothioate bond"
  modified_base (21)..(21): Locked nucleic acid (LNA) nucleotide
gugccucgauaacucuggcaa

SEQ ID NO: 1587 - RNA, 21 nt, Artificial Sequence
  source: /note="Description of Artificial Sequence: Synthetic oligonucleotide"
  modified_base (1)..(1): 2'-OMe-nucleotide
  misc_feature (1)..(2): /note="phosphorothioate bond"
  modified_base (2)..(2): 2'-fluoro-nucleotide
  misc_feature (2)..(3): /note="phosphorothioate bond"
  modified_base (3)..(3): 2'-OMe-nucleotide
  modified_base (4)..(4): 2'-fluoro-nucleotide
  modified_base (5)..(5): 2'-OMe-nucleotide
  modified_base (6)..(6): 2'-OMe-nucleotide
  modified_base (7)..(7): 2'-OMe-nucleotide
  modified_base (8)..(8): 2'-fluoro-nucleotide
  modified_base (9)..(9): 2'-fluoro-nucleotide
  modified_base (10)..(10): 2'-OMe-nucleotide
  modified_base (11)..(11): 2'-OMe-nucleotide
  modified_base (12)..(12): 2'-OMe-nucleotide
  modified_base (13)..(13): 2'-OMe-nucleotide
  modified_base (14)..(14): 2'-fluoro-nucleotide
  modified_base (15)..(15): 2'-OMe-nucleotide
  modified_base (16)..(16): 2'-fluoro-nucleotide
  modified_base (17)..(17): 2'-OMe-nucleotide
  modified_base (18)..(18): 2'-OMe-nucleotide
  modified_base (19)..(19): 2'-OMe-nucleotide
  misc_feature (19)..(20): /note="phosphorothioate bond"
  modified_base (20)..(20): Locked nucleic acid (LNA) nucleotide
  misc_feature (20)..(21): /note="phosphorothioate bond"
  modified_base (21)..(21): Locked nucleic acid (LNA) nucleotide
gugccucgauaacucuggcaa

SEQ ID NO: 1588 - RNA, 21 nt, Artificial Sequence
  source: /note="Description of Artificial Sequence: Synthetic oligonucleotide"
  modified_base (1)..(1): 2'-OMe-nucleotide
  misc_feature (1)..(2): /note="phosphorothioate bond"
  modified_base (2)..(2): 2'-fluoro-nucleotide
  misc_feature (2)..(3): /note="phosphorothioate bond"
  modified_base (3)..(3): 2'-OMe-nucleotide
  modified_base (4)..(4): 2'-fluoro-nucleotide
  modified_base (5)..(5): 2'-OMe-nucleotide
  modified_base (6)..(6): 2'-OMe-nucleotide
  modified_base (7)..(7): 2'-OMe-nucleotide
  modified_base (8)..(8): 2'-OMe-nucleotide
  modified_base (9)..(9): 2'-fluoro-nucleotide
  modified_base (10)..(10): 2'-OMe-nucleotide
  modified_base (11)..(11): 2'-OMe-nucleotide
  modified_base (12)..(12): 2'-OMe-nucleotide
  modified_base (13)..(13): 2'-OMe-nucleotide
  modified_base (14)..(14): 2'-fluoro-nucleotide
  modified_base (15)..(15): 2'-OMe-nucleotide
  modified_base (16)..(16): 2'-fluoro-nucleotide
  modified_base (17)..(17): 2'-OMe-nucleotide
  modified_base (18)..(18): 2'-OMe-nucleotide
  modified_base (19)..(19): 2'-OMe-nucleotide
  misc_feature (19)..(20): /note="phosphorothioate bond"
  modified_base (20)..(20): Locked nucleic acid (LNA) nucleotide
  misc_feature (20)..(21): /note="phosphorothioate bond"
  modified_base (21)..(21): Locked nucleic acid (LNA) nucleotide
gugccucgauaacucuggcaa

SEQ ID NO: 1589 - RNA, 21 nt, Artificial Sequence
  source: /note="Description of Artificial Sequence: Synthetic oligonucleotide"
  modified_base (1)..(1): 2'-OMe-nucleotide
  misc_feature (1)..(2): /note="phosphorothioate bond"
  modified_base (2)..(2): 2'-fluoro-nucleotide
  misc_feature (2)..(3): /note="phosphorothioate bond"
  modified_base (3)..(3): 2'-OMe-nucleotide
  modified_base (4)..(4): 2'-fluoro-nucleotide
  modified_base (5)..(5): 2'-OMe-nucleotide
  modified_base (6)..(6): 2'-OMe-nucleotide
  modified_base (7)..(7): 2'-OMe-nucleotide
  modified_base (8)..(8): 2'-OMe-nucleotide
  modified_base (9)..(9): 2'-OMe-nucleotide
  modified_base (10)..(10): 2'-OMe-nucleotide
  modified_base (11)..(11): 2'-OMe-nucleotide
  modified_base (12)..(12): 2'-OMe-nucleotide
  modified_base (13)..(13): 2'-OMe-nucleotide
  modified_base (14)..(14): 2'-fluoro-nucleotide
  modified_base (15)..(15): 2'-OMe-nucleotide
  modified_base (16)..(16): 2'-fluoro-nucleotide
  modified_base (17)..(17): 2'-OMe-nucleotide
  modified_base (18)..(18): 2'-OMe-nucleotide
  modified_base (19)..(19): 2'-OMe-nucleotide
  misc_feature (19)..(20): /note="phosphorothioate bond"
  modified_base (20)..(20): 2'-OMe-nucleotide
  misc_feature (20)..(21): /note="phosphorothioate bond"
  modified_base (21)..(21): 2'-OMe-nucleotide
gugccucgauaacucuggcaa

SEQ ID NO: 1590 - RNA, 21 nt, Artificial Sequence
  source: /note="Description of Artificial Sequence: Synthetic oligonucleotide"
  modified_base (1)..(1): 2'-OMe-nucleotide
  misc_feature (1)..(2): /note="phosphorothioate bond"
  modified_base (2)..(2): 2'-fluoro-nucleotide
  misc_feature (2)..(3): /note="phosphorothioate bond"
  modified_base (3)..(3): 2'-OMe-nucleotide
  modified_base (4)..(4): 2'-OMe-nucleotide
  modified_base (5)..(5): 2'-OMe-nucleotide
  modified_base (6)..(6): 2'-fluoro-nucleotide
  modified_base (7)..(7): 2'-OMe-nucleotide
  modified_base (8)..(8): 2'-OMe-nucleotide
  modified_base (9)..(9): 2'-OMe-nucleotide
  modified_base (10)..(10): 2'-OMe-nucleotide
  modified_base (11)..(11): 2'-OMe-nucleotide
  modified_base (12)..(12): 2'-OMe-nucleotide
  modified_base (13)..(13): 2'-OMe-nucleotide
  modified_base (14)..(14): 2'-fluoro-nucleotide
  modified_base (15)..(15): 2'-OMe-nucleotide
  modified_base (16)..(16): 2'-fluoro-nucleotide
  modified_base (17)..(17): 2'-OMe-nucleotide
  modified_base (18)..(18): 2'-OMe-nucleotide
  modified_base (19)..(19): 2'-OMe-nucleotide
  misc_feature (19)..(20): /note="phosphorothioate bond"
  modified_base (20)..(20): 2'-OMe-nucleotide
  misc_feature (20)..(21): /note="phosphorothioate bond"
  modified_base (21)..(21): 2'-OMe-nucleotide
gugccucgauaacucuggcaa

SEQ ID NO: 1591 - RNA, 21 nt, Artificial Sequence
  source: /note="Description of Artificial Sequence: Synthetic oligonucleotide"
  modified_base (1)..(1): 2'-OMe-nucleotide
  misc_feature (1)..(2): /note="phosphorothioate bond"
  modified_base (2)..(2): 2'-fluoro-nucleotide
  misc_feature (2)..(3): /note="phosphorothioate bond"
  modified_base (3)..(3): 2'-OMe-nucleotide
  modified_base (4)..(4): 2'-fluoro-nucleotide
  modified_base (5)..(5): 2'-OMe-nucleotide
  modified_base (6)..(6): 2'-OMe-nucleotide
  modified_base (7)..(7): 2'-OMe-nucleotide
  modified_base (8)..(8): 2'-fluoro-nucleotide
  modified_base (9)..(9): 2'-fluoro-nucleotide
  modified_base (10)..(10): 2'-OMe-nucleotide
  modified_base (11)..(11): 2'-OMe-nucleotide
  modified_base (12)..(12): 2'-OMe-nucleotide
  modified_base (13)..(13): 2'-OMe-nucleotide
  modified_base (14)..(14): 2'-fluoro-nucleotide
  modified_base (15)..(15): 2'-OMe-nucleotide
  modified_base (16)..(16): 2'-fluoro-nucleotide
  modified_base (17)..(17): 2'-OMe-nucleotide
  modified_base (18)..(18): 2'-OMe-nucleotide
  modified_base (19)..(19): 2'-OMe-nucleotide
  misc_feature (19)..(20): /note="phosphorothioate bond"
  modified_base (20)..(20): 2'-OMe-nucleotide
  misc_feature (20)..(21): /note="phosphorothioate bond"
  modified_base (21)..(21): 2'-OMe-nucleotide
gugccucgauaacucuggcaa

SEQ ID NO: 1592 - RNA, 21 nt, Artificial Sequence
  source: /note="Description of Artificial Sequence: Synthetic oligonucleotide"
  modified_base (1)..(1): 2'-OMe-nucleotide
  misc_feature (1)..(2): /note="phosphorothioate bond"
  modified_base (2)..(2): 2'-fluoro-nucleotide
  misc_feature (2)..(3): /note="phosphorothioate bond"
  modified_base (3)..(3): 2'-OMe-nucleotide
  modified_base (4)..(4): 2'-fluoro-nucleotide
  modified_base (5)..(5): 2'-OMe-nucleotide
  modified_base (6)..(6): 2'-OMe-nucleotide
  modified_base (7)..(7): 2'-OMe-nucleotide
  modified_base (8)..(8): 2'-OMe-nucleotide
  modified_base (9)..(9): 2'-fluoro-nucleotide
  modified_base (10)..(10): 2'-OMe-nucleotide
  modified_base (11)..(11): 2'-OMe-nucleotide
  modified_base (12)..(12): 2'-OMe-nucleotide
  modified_base (13)..(13): 2'-OMe-nucleotide
  modified_base (14)..(14): 2'-fluoro-nucleotide
  modified_base (15)..(15): 2'-OMe-nucleotide
  modified_base (16)..(16): 2'-fluoro-nucleotide
  modified_base (17)..(17): 2'-OMe-nucleotide
  modified_base (18)..(18): 2'-OMe-nucleotide
  modified_base (19)..(19): 2'-OMe-nucleotide
  misc_feature (19)..(20): /note="phosphorothioate bond"
  modified_base (20)..(20): 2'-OMe-nucleotide
  misc_feature (20)..(21): /note="phosphorothioate bond"
  modified_base (21)..(21): 2'-OMe-nucleotide
gugccucgauaacucuggcaa

SEQ ID NO: 1593 - DNA, 21 bp, Artificial Sequence
  source: /note="Description of Artificial Sequence: Synthetic oligonucleotide"
  source: /note="Description of Combined DNA/RNA Molecule: Synthetic oligonucleotide"
  modified_base (1)..(1): 2'-fluoro-nucleotide
  misc_feature (1)..(2): /note="phosphorothioate bond"
  modified_base (2)..(2): 2'-fluoro-nucleotide
  misc_feature (2)..(3): /note="phosphorothioate bond"
  modified_base (3)..(3): 2'-OMe-nucleotide
  modified_base (4)..(4): 2'-fluoro-nucleotide
  modified_base (5)..(5): 2'-OMe-nucleotide
  modified_base (6)..(6): 2'-fluoro-nucleotide
  modified_base (7)..(7): 2'-OMe-nucleotide
  modified_base (8)..(8): 2'-fluoro-nucleotide
  modified_base (9)..(9): 2'-OMe-nucleotide
  modified_base (10)..(10): 2'-fluoro-nucleotide
  modified_base (11)..(11): 2'-OMe-nucleotide
  modified_base (12)..(12): 2'-OMe-nucleotide
  modified_base (13)..(13): 2'-OMe-nucleotide
  modified_base (14)..(14): 2'-fluoro-nucleotide
  modified_base (15)..(15): 2'-OMe-nucleotide
  modified_base (16)..(16): 2'-fluoro-nucleotide
  modified_base (17)..(17): 2'-OMe-nucleotide
  modified_base (18)..(18): 2'-fluoro-nucleotide
  modified_base (19)..(19): 2'-OMe-nucleotide
  misc_feature (19)..(20): /note="phosphorothioate bond"
  modified_base (20)..(20): dT
  misc_feature (20)..(21): /note="phosphorothioate bond"
  modified_base (21)..(21): dT
gugccucgauaacucuggctt

SEQ ID NO: 1594 - RNA, 21 nt, Artificial Sequence
  source: /note="Description of Artificial Sequence: Synthetic oligonucleotide"
  modified_base (1)..(1): 2'-OMe-nucleotide
  misc_feature (1)..(2): /note="phosphorothioate bond"
  modified_base (2)..(2): 2'-fluoro-nucleotide
  misc_feature (2)..(3): /note="phosphorothioate bond"
  modified_base (3)..(3): 2'-OMe-nucleotide
  modified_base (4)..(4): 2'-fluoro-nucleotide
  modified_base (5)..(5): 2'-OMe-nucleotide
  modified_base (6)..(6): 2'-OMe-nucleotide
  modified_base (7)..(7): 2'-OMe-nucleotide
  modified_base (8)..(8): 2'-OMe-nucleotide
  modified_base (9)..(9): 2'-OMe-nucleotide
  modified_base (10)..(10): 2'-OMe-nucleotide
  modified_base (11)..(11): 2'-OMe-nucleotide
  modified_base (12)..(12): 2'-OMe-nucleotide
  modified_base (13)..(13): 2'-OMe-nucleotide
  modified_base (14)..(14): 2'-fluoro-nucleotide
  modified_base (15)..(15): 2'-OMe-nucleotide
  modified_base (16)..(16): 2'-fluoro-nucleotide
  modified_base (17)..(17): 2'-OMe-nucleotide
  modified_base (18)..(18): 2'-OMe-nucleotide
  modified_base (19)..(19): 2'-OMe-nucleotide
  misc_feature (19)..(20): /note="phosphorothioate bond"
  modified_base (20)..(20): 2'-OMe-nucleotide
  misc_feature (20)..(21): /note="phosphorothioate bond"
  modified_base (21)..(21): 2'-OMe-nucleotide
gugccucgauaacucuggcaa

SEQ ID NO: 1595 - RNA, 21 nt, Artificial Sequence
  source: /note="Description of Artificial Sequence: Synthetic oligonucleotide"
  modified_base (1)..(1): 2'-OMe-nucleotide
  misc_feature (1)..(2): /note="phosphorothioate bond"
  modified_base (2)..(2): 2'-fluoro-nucleotide
  misc_feature (2)..(3): /note="phosphorothioate bond"
  modified_base (3)..(3): 2'-OMe-nucleotide
  modified_base (4)..(4): 2'-OMe-nucleotide
  modified_base (5)..(5): 2'-OMe-nucleotide
  modified_base (6)..(6): 2'-fluoro-nucleotide
  modified_base (7)..(7): 2'-OMe-nucleotide
  modified_base (8)..(8): 2'-OMe-nucleotide
  modified_base (9)..(9): 2'-OMe-nucleotide
  modified_base (10)..(10): 2'-OMe-nucleotide
  modified_base (11)..(11): 2'-OMe-nucleotide
  modified_base (12)..(12): 2'-OMe-nucleotide
  modified_base (13)..(13): 2'-OMe-nucleotide
  modified_base (14)..(14): 2'-fluoro-nucleotide
  modified_base (15)..(15): 2'-OMe-nucleotide
  modified_base (16)..(16): 2'-fluoro-nucleotide
  modified_base (17)..(17): 2'-OMe-nucleotide
  modified_base (18)..(18): 2'-OMe-nucleotide
  modified_base (19)..(19): 2'-OMe-nucleotide
  misc_feature (19)..(20): /note="phosphorothioate bond"
  modified_base (20)..(20): 2'-OMe-nucleotide
  misc_feature (20)..(21): /note="phosphorothioate bond"
  modified_base (21)..(21): 2'-OMe-nucleotide
gugccucgauaacucuggcaa

SEQ ID NO: 1596 - RNA, 21 nt, Artificial Sequence
  source: /note="Description of Artificial Sequence: Synthetic oligonucleotide"
  modified_base (1)..(1): 2'-OMe-nucleotide
  misc_feature (1)..(2): /note="phosphorothioate bond"
  modified_base (2)..(2): 2'-fluoro-nucleotide
  misc_feature (2)..(3): /note="phosphorothioate bond"
  modified_base (3)..(3): 2'-OMe-nucleotide
  modified_base (4)..(4): 2'-fluoro-nucleotide
  modified_base (5)..(5): 2'-OMe-nucleotide
  modified_base (6)..(6): 2'-OMe-nucleotide
  modified_base (7)..(7): 2'-OMe-nucleotide
  modified_base (8)..(8): 2'-fluoro-nucleotide
  modified_base (9)..(9): 2'-fluoro-nucleotide
  modified_base (10)..(10): 2'-OMe-nucleotide
  modified_base (11)..(11): 2'-OMe-nucleotide
  modified_base (12)..(12): 2'-OMe-nucleotide
  modified_base (13)..(13): 2'-OMe-nucleotide
  modified_base (14)..(14): 2'-fluoro-nucleotide
  modified_base (15)..(15): 2'-OMe-nucleotide
  modified_base (16)..(16): 2'-fluoro-nucleotide
  modified_base (17)..(17): 2'-OMe-nucleotide
  modified_base (18)..(18): 2'-OMe-nucleotide
  modified_base (19)..(19): 2'-OMe-nucleotide
  misc_feature (19)..(20): /note="phosphorothioate bond"
  modified_base (20)..(20): 2'-OMe-nucleotide
  misc_feature (20)..(21): /note="phosphorothioate bond"
  modified_base (21)..(21): 2'-OMe-nucleotide
gugccucgauaacucuggcaa

SEQ ID NO: 1597 - RNA, 21 nt, Artificial Sequence
  source: /note="Description of Artificial Sequence: Synthetic oligonucleotide"
  modified_base (1)..(1): 2'-OMe-nucleotide
  misc_feature (1)..(2): /note="phosphorothioate bond"
  modified_base (2)..(2): 2'-fluoro-nucleotide
  misc_feature (2)..(3): /note="phosphorothioate bond"
  modified_base (3)..(3): 2'-OMe-nucleotide
  modified_base (4)..(4): 2'-fluoro-nucleotide
  modified_base (5)..(5): 2'-OMe-nucleotide
  modified_base (6)..(6): 2'-OMe-nucleotide
  modified_base (7)..(7): 2'-OMe-nucleotide
  modified_base (8)..(8): 2'-OMe-nucleotide
  modified_base (9)..(9): 2'-fluoro-nucleotide
  modified_base (10)..(10): 2'-OMe-nucleotide
  modified_base (11)..(11): 2'-OMe-nucleotide
  modified_base (12)..(12): 2'-OMe-nucleotide
  modified_base (13)..(13): 2'-OMe-nucleotide
  modified_base (14)..(14): 2'-fluoro-nucleotide
  modified_base (15)..(15): 2'-OMe-nucleotide
  modified_base (16)..(16): 2'-fluoro-nucleotide
  modified_base (17)..(17): 2'-OMe-nucleotide
  modified_base (18)..(18): 2'-OMe-nucleotide
  modified_base (19)..(19): 2'-OMe-nucleotide
  misc_feature (19)..(20): /note="phosphorothioate bond"
  modified_base (20)..(20): 2'-OMe-nucleotide
  misc_feature (20)..(21): /note="phosphorothioate bond"
  modified_base (21)..(21): 2'-OMe-nucleotide
gugccucgauaacucuggcaa

SEQ ID NO: 1598 - DNA, 21 bp, Artificial Sequence
  source: /note="Description of Artificial Sequence: Synthetic oligonucleotide"
  source: /note="Description of Combined DNA/RNA Molecule: Synthetic oligonucleotide"
  modified_base (1)..(1): 2'-fluoro-nucleotide
  misc_feature (1)..(2): /note="phosphorothioate bond"
  modified_base (2)..(2): 2'-fluoro-nucleotide
  misc_feature (2)..(3): /note="phosphorothioate bond"
  modified_base (3)..(3): 2'-OMe-nucleotide
  modified_base (4)..(4): 2'-fluoro-nucleotide
  modified_base (5)..(5): 2'-OMe-nucleotide
  modified_base (6)..(6): 2'-fluoro-nucleotide
  modified_base (7)..(7): 2'-OMe-nucleotide
  modified_base (8)..(8): 2'-fluoro-nucleotide
  modified_base (9)..(9): 2'-OMe-nucleotide
  modified_base (10)..(10): 2'-fluoro-nucleotide
  modified_base (11)..(11): 2'-OMe-nucleotide
  modified_base (12)..(12): 2'-OMe-nucleotide
  modified_base (13)..(13): 2'-OMe-nucleotide
  modified_base (14)..(14): 2'-fluoro-nucleotide
  modified_base (15)..(15): 2'-OMe-nucleotide
  modified_base (16)..(16): 2'-fluoro-nucleotide
  modified_base (17)..(17): 2'-OMe-nucleotide
  modified_base (18)..(18): 2'-fluoro-nucleotide
  modified_base (19)..(19): 2'-OMe-nucleotide
  misc_feature (19)..(20): /note="phosphorothioate bond"
  modified_base (20)..(20): dT
  misc_feature (20)..(21): /note="phosphorothioate bond"
  modified_base (21)..(21): dT
gugccucgauaacucuggctt

SEQ ID NO: 1599 - RNA, 21 nt, Artificial Sequence
  source: /note="Description of Artificial Sequence: Synthetic oligonucleotide"
  modified_base (1)..(1): 2'-OMe-nucleotide
  misc_feature (1)..(2): /note="phosphorothioate bond"
  modified_base (2)..(2): 2'-fluoro-nucleotide
  misc_feature (2)..(3): /note="phosphorothioate bond"
  modified_base (3)..(3): 2'-OMe-nucleotide
  modified_base (4)..(4): 2'-fluoro-nucleotide
  modified_base (5)..(5): 2'-OMe-nucleotide
  modified_base (6)..(6): 2'-OMe-nucleotide
  modified_base (7)..(7): 2'-OMe-nucleotide
  modified_base (8)..(8): 2'-OMe-nucleotide
  modified_base (9)..(9): 2'-OMe-nucleotide
  modified_base (10)..(10): 2'-OMe-nucleotide
  modified_base (11)..(11): 2'-OMe-nucleotide
  modified_base (12)..(12): 2'-OMe-nucleotide
  modified_base (13)..(13): 2'-OMe-nucleotide
  modified_base (14)..(14): 2'-fluoro-nucleotide
  modified_base (15)..(15): 2'-OMe-nucleotide
  modified_base (16)..(16): 2'-fluoro-nucleotide
  modified_base (17)..(17): 2'-OMe-nucleotide
  modified_base (18)..(18): 2'-OMe-nucleotide
  modified_base (19)..(19): 2'-OMe-nucleotide
  misc_feature (19)..(20): /note="phosphorothioate bond"
  modified_base (20)..(20): 2'-OMe-nucleotide
  misc_feature (20)..(21): /note="phosphorothioate bond"
  modified_base (21)..(21): 2'-OMe-nucleotide
gugccucgauaacucuggcaa

SEQ ID NO: 1600 - RNA, 21 nt, Artificial Sequence
  source: /note="Description of Artificial Sequence: Synthetic oligonucleotide"
  modified_base (1)..(1): 2'-OMe-nucleotide
  misc_feature (1)..(2): /note="phosphorothioate bond"
  modified_base (2)..(2): 2'-fluoro-nucleotide
  misc_feature (2)..(3): /note="phosphorothioate bond"
  modified_base (3)..(3): 2'-OMe-nucleotide
  modified_base (4)..(4): 2'-OMe-nucleotide
  modified_base (5)..(5): 2'-OMe-nucleotide
  modified_base (6)..(6): 2'-fluoro-nucleotide
  modified_base (7)..(7): 2'-OMe-nucleotide
  modified_base (8)..(8): 2'-OMe-nucleotide
  modified_base (9)..(9): 2'-OMe-nucleotide
  modified_base (10)..(10): 2'-OMe-nucleotide
  modified_base (11)..(11): 2'-OMe-nucleotide
  modified_base (12)..(12): 2'-OMe-nucleotide
  modified_base (13)..(13): 2'-OMe-nucleotide
  modified_base (14)..(14): 2'-fluoro-nucleotide
  modified_base (15)..(15): 2'-OMe-nucleotide
  modified_base (16)..(16): 2'-fluoro-nucleotide
  modified_base (17)..(17): 2'-OMe-nucleotide
  modified_base (18)..(18): 2'-OMe-nucleotide
  modified_base (19)..(19): 2'-OMe-nucleotide
  misc_feature (19)..(20): /note="phosphorothioate bond"
  modified_base (20)..(20): 2'-OMe-nucleotide
  misc_feature (20)..(21): /note="phosphorothioate bond"
  modified_base (21)..(21): 2'-OMe-nucleotide
  source: /note="C-term hydroxyl group"
gugccucgauaacucuggcaa

SEQ ID NO: 1601 - RNA, 21 nt, Artificial Sequence
  source: /note="Description of Artificial Sequence: Synthetic oligonucleotide"
  modified_base (1)..(1): 2'-OMe-nucleotide
  misc_feature (1)..(2): /note="phosphorothioate bond"
  modified_base (2)..(2): 2'-fluoro-nucleotide
  misc_feature (2)..(3): /note="phosphorothioate bond"
  modified_base (3)..(3): 2'-OMe-nucleotide
  modified_base (4)..(4): 2'-fluoro-nucleotide
  modified_base (5)..(5): 2'-OMe-nucleotide
  modified_base (6)..(6): 2'-OMe-nucleotide
  modified_base (7)..(7): 2'-OMe-nucleotide
  modified_base (8)..(8): 2'-fluoro-nucleotide
  modified_base (9)..(9): 2'-fluoro-nucleotide
  modified_base (10)..(10): 2'-OMe-nucleotide
  modified_base (11)..(11): 2'-OMe-nucleotide
  modified_base (12)..(12): 2'-OMe-nucleotide
  modified_base (13)..(13): 2'-OMe-nucleotide
  modified_base (14)..(14): 2'-fluoro-nucleotide
  modified_base (15)..(15): 2'-OMe-nucleotide
  modified_base (16)..(16): 2'-fluoro-nucleotide
  modified_base (17)..(17): 2'-OMe-nucleotide
  modified_base (18)..(18): 2'-OMe-nucleotide
  modified_base (19)..(19): 2'-OMe-nucleotide
  misc_feature (19)..(20): /note="phosphorothioate bond"
  modified_base (20)..(20): 2'-OMe-nucleotide
  misc_feature (20)..(21): /note="phosphorothioate bond"
  modified_base (21)..(21): 2'-OMe-nucleotide
gugccucgauaacucuggcaa

SEQ ID NO: 1602 - RNA, 21 nt, Artificial Sequence
  source: /note="Description of Artificial Sequence: Synthetic oligonucleotide"
  modified_base (1)..(1): 2'-OMe-nucleotide
  misc_feature (1)..(2): /note="phosphorothioate bond"
  modified_base (2)..(2): 2'-fluoro-nucleotide
  misc_feature (2)..(3): /note="phosphorothioate bond"
  modified_base (3)..(3): 2'-OMe-nucleotide
  modified_base (4)..(4): 2'-fluoro-nucleotide
  modified_base (5)..(5): 2'-OMe-nucleotide
  modified_base (6)..(6): 2'-OMe-nucleotide
  modified_base (7)..(7): 2'-OMe-nucleotide
  modified_base (8)..(8): 2'-OMe-nucleotide
  modified_base (9)..(9): 2'-fluoro-nucleotide
  modified_base (10)..(10): 2'-OMe-nucleotide
  modified_base (11)..(11): 2'-OMe-nucleotide
  modified_base (12)..(12): 2'-OMe-nucleotide
  modified_base (13)..(13): 2'-OMe-nucleotide
  modified_base (14)..(14): 2'-fluoro-nucleotide
  modified_base (15)..(15): 2'-OMe-nucleotide
  modified_base (16)..(16): 2'-fluoro-nucleotide
  modified_base (17)..(17): 2'-OMe-nucleotide
  modified_base (18)..(18): 2'-OMe-nucleotide
  modified_base (19)..(19): 2'-OMe-nucleotide
  misc_feature (19)..(20): /note="phosphorothioate bond"
  modified_base (20)..(20): 2'-OMe-nucleotide
  misc_feature (20)..(21): /note="phosphorothioate bond"
  modified_base (21)..(21): 2'-OMe-nucleotide
gugccucgauaacucuggcaa

SEQ ID NO: 1603 - DNA, 21 bp, Artificial Sequence
  source: /note="Description of Artificial Sequence: Synthetic oligonucleotide"
  source: /note="Description of Combined DNA/RNA Molecule: Synthetic oligonucleotide"
  modified_base (1)..(1): 2'-fluoro-nucleotide
  misc_feature (1)..(2): /note="phosphorothioate bond"
  modified_base (2)..(2): 2'-fluoro-nucleotide
  misc_feature (2)..(3): /note="phosphorothioate bond"
  modified_base (3)..(3): 2'-OMe-nucleotide
  modified_base (4)..(4): 2'-fluoro-nucleotide
  modified_base (5)..(5): 2'-OMe-nucleotide
  modified_base (6)..(6): 2'-fluoro-nucleotide
  modified_base (7)..(7): 2'-OMe-nucleotide
  modified_base (8)..(8): 2'-fluoro-nucleotide
  modified_base (9)..(9): 2'-OMe-nucleotide
  modified_base (10)..(10): 2'-fluoro-nucleotide
  modified_base (11)..(11): 2'-OMe-nucleotide
  modified_base (12)..(12): 2'-OMe-nucleotide
  modified_base (13)..(13): 2'-OMe-nucleotide
  modified_base (14)..(14): 2'-fluoro-nucleotide
  modified_base (15)..(15): 2'-OMe-nucleotide
  modified_base (16)..(16): 2'-fluoro-nucleotide
  modified_base (17)..(17): 2'-OMe-nucleotide
  modified_base (18)..(18): 2'-fluoro-nucleotide
  modified_base (19)..(19): 2'-OMe-nucleotide
  misc_feature (19)..(20): /note="phosphorothioate bond"
  modified_base (20)..(20): dT
  misc_feature (20)..(21): /note="phosphorothioate bond"
  modified_base (21)..(21): dT
gugccucgauaacucuggctt

SEQ ID NO: 1604 - RNA, 21 nt, Artificial Sequence
  source: /note="Description of Artificial Sequence: Synthetic oligonucleotide"
  modified_base (1)..(1): 2'-OMe-nucleotide
  misc_feature (1)..(2): /note="phosphorothioate bond"
  modified_base (2)..(2): 2'-fluoro-nucleotide
  misc_feature (2)..(3): /note="phosphorothioate bond"
  modified_base (3)..(3): 2'-OMe-nucleotide
  modified_base (4)..(4): 2'-fluoro-nucleotide
  modified_base (5)..(5): 2'-OMe-nucleotide
  modified_base (6)..(6): 2'-OMe-nucleotide
  modified_base (7)..(7): 2'-OMe-nucleotide
  modified_base (8)..(8): 2'-OMe-nucleotide
  modified_base (9)..(9): 2'-OMe-nucleotide
  modified_base (10)..(10): 2'-OMe-nucleotide
  modified_base (11)..(11): 2'-OMe-nucleotide
  modified_base (12)..(12): 2'-OMe-nucleotide
  modified_base (13)..(13): 2'-OMe-nucleotide
  modified_base (14)..(14): 2'-fluoro-nucleotide
  modified_base (15)..(15): 2'-OMe-nucleotide
  modified_base (16)..(16): 2'-fluoro-nucleotide
  modified_base (17)..(17): 2'-OMe-nucleotide
  modified_base (18)..(18): 2'-OMe-nucleotide
  modified_base (19)..(19): 2'-OMe-nucleotide
  misc_feature (19)..(20): /note="phosphorothioate bond"
  modified_base (20)..(20): Locked nucleic acid (LNA) nucleotide
  misc_feature (20)..(21): /note="phosphorothioate bond"
  modified_base (21)..(21): Locked nucleic acid (LNA) nucleotide
gugccucgauaacucuggcaa

SEQ ID NO: 1605 - RNA, 21 nt, Artificial Sequence
  source: /note="Description of Artificial Sequence: Synthetic oligonucleotide"
  modified_base (1)..(1): 2'-OMe-nucleotide
  misc_feature (1)..(2): /note="phosphorothioate bond"
  modified_base (2)..(2): 2'-fluoro-nucleotide
  misc_feature (2)..(3): /note="phosphorothioate bond"
  modified_base (3)..(3): 2'-OMe-nucleotide
  modified_base (4)..(4): 2'-OMe-nucleotide
  modified_base (5)..(5): 2'-OMe-nucleotide
  modified_base (6)..(6): 2'-fluoro-nucleotide
  modified_base (7)..(7): 2'-OMe-nucleotide
  modified_base (8)..(8): 2'-OMe-nucleotide
  modified_base (9)..(9): 2'-OMe-nucleotide
  modified_base (10)..(10): 2'-OMe-nucleotide
  modified_base (11)..(11): 2'-OMe-nucleotide
  modified_base (12)..(12): 2'-OMe-nucleotide
  modified_base (13)..(13): 2'-OMe-nucleotide
  modified_base (14)..(14): 2'-fluoro-nucleotide
  modified_base (15)..(15): 2'-OMe-nucleotide
  modified_base (16)..(16): 2'-fluoro-nucleotide
  modified_base (17)..(17): 2'-OMe-nucleotide
  modified_base (18)..(18): 2'-OMe-nucleotide
  modified_base (19)..(19): 2'-OMe-nucleotide
  misc_feature (19)..(20): /note="phosphorothioate bond"
  modified_base (20)..(20): Locked nucleic acid (LNA) nucleotide
  misc_feature (20)..(21): /note="phosphorothioate bond"
  modified_base (21)..(21): Locked nucleic acid (LNA) nucleotide
gugccucgauaacucuggcaa

SEQ ID NO: 1606 - RNA, 21 nt, Artificial Sequence
  source: /note="Description of Artificial Sequence: Synthetic oligonucleotide"
  modified_base (1)..(1): 2'-OMe-nucleotide
  misc_feature (1)..(2): /note="phosphorothioate bond"
  modified_base (2)..(2): 2'-fluoro-nucleotide
  misc_feature (2)..(3): /note="phosphorothioate bond"
  modified_base (3)..(3): 2'-OMe-nucleotide
  modified_base (4)..(4): 2'-fluoro-nucleotide
  modified_base (5)..(5): 2'-OMe-nucleotide
  modified_base (6)..(6): 2'-OMe-nucleotide
  modified_base (7)..(7): 2'-OMe-nucleotide
  modified_base (8)..(8): 2'-fluoro-nucleotide
  modified_base (9)..(9): 2'-fluoro-nucleotide
  modified_base (10)..(10): 2'-OMe-nucleotide
  modified_base (11)..(11): 2'-OMe-nucleotide
  modified_base (12)..(12): 2'-OMe-nucleotide
  modified_base (13)..(13): 2'-OMe-nucleotide
  modified_base (14)..(14): 2'-fluoro-nucleotide
  modified_base (15)..(15): 2'-OMe-nucleotide
  modified_base (16)..(16): 2'-fluoro-nucleotide
  modified_base (17)..(17): 2'-OMe-nucleotide
  modified_base (18)..(18): 2'-OMe-nucleotide
  modified_base (19)..(19): 2'-OMe-nucleotide
  misc_feature (19)..(20): /note="phosphorothioate bond"
  modified_base (20)..(20): Locked nucleic acid (LNA) nucleotide
  misc_feature (20)..(21): /note="phosphorothioate bond"
  modified_base (21)..(21): Locked nucleic acid (LNA) nucleotide
gugccucgauaacucuggcaa

SEQ ID NO: 1607 - RNA, 21 nt, Artificial Sequence
  source: /note="Description of Artificial Sequence: Synthetic oligonucleotide"
  modified_base (1)..(1): 2'-OMe-nucleotide
  misc_feature (1)..(2): /note="phosphorothioate bond"
  modified_base (2)..(2): 2'-fluoro-nucleotide
  misc_feature (2)..(3): /note="phosphorothioate bond"
  modified_base (3)..(3): 2'-OMe-nucleotide
  modified_base (4)..(4): 2'-fluoro-nucleotide
  modified_base (5)..(5): 2'-OMe-nucleotide
  modified_base (6)..(6): 2'-OMe-nucleotide
  modified_base (7)..(7): 2'-OMe-nucleotide
  modified_base (8)..(8): 2'-OMe-nucleotide
  modified_base (9)..(9): 2'-fluoro-nucleotide
  modified_base (10)..(10): 2'-OMe-nucleotide
  modified_base (11)..(11): 2'-OMe-nucleotide
  modified_base (12)..(12): 2'-OMe-nucleotide
  modified_base (13)..(13): 2'-OMe-nucleotide
  modified_base (14)..(14): 2'-fluoro-nucleotide
  modified_base (15)..(15): 2'-OMe-nucleotide
  modified_base (16)..(16): 2'-fluoro-nucleotide
  modified_base (17)..(17): 2'-OMe-nucleotide
  modified_base (18)..(18): 2'-OMe-nucleotide
  modified_base (19)..(19): 2'-OMe-nucleotide
  misc_feature (19)..(20): /note="phosphorothioate bond"
  modified_base (20)..(20): Locked nucleic acid (LNA) nucleotide
  misc_feature (20)..(21): /note="phosphorothioate bond"
  modified_base (21)..(21): Locked nucleic acid (LNA) nucleotide
gugccucgauaacucuggcaa

SEQ ID NO: 1608 - RNA, 21 nt, Artificial Sequence
  source: /note="Description of Artificial Sequence: Synthetic oligonucleotide"
  modified_base (1)..(1): 2'-OMe-nucleotide
  misc_feature (1)..(2): /note="phosphorothioate bond"
  modified_base (2)..(2): 2'-fluoro-nucleotide
  misc_feature (2)..(3): /note="phosphorothioate bond"
  modified_base (3)..(3): 2'-OMe-nucleotide
  modified_base (4)..(4): 2'-fluoro-nucleotide
  modified_base (5)..(5): 2'-OMe-nucleotide
  modified_base (6)..(6): 2'-OMe-nucleotide
  modified_base (7)..(7): 2'-OMe-nucleotide
  modified_base (8)..(8): 2'-OMe-nucleotide
  modified_base (9)..(9): 2'-OMe-nucleotide
  modified_base (10)..(10): 2'-OMe-nucleotide
  modified_base (11)..(11): 2'-OMe-nucleotide
  modified_base (12)..(12): 2'-OMe-nucleotide
  modified_base (13)..(13): 2'-OMe-nucleotide
  modified_base (14)..(14): 2'-fluoro-nucleotide
  modified_base (15)..(15): 2'-OMe-nucleotide
  modified_base (16)..(16): 2'-fluoro-nucleotide
  modified_base (17)..(17): 2'-OMe-nucleotide
  modified_base (18)..(18): 2'-OMe-nucleotide
  modified_base (19)..(19): 2'-OMe-nucleotide
  misc_feature (19)..(20): /note="phosphorothioate bond"
  modified_base (20)..(20): 2'-OMe-nucleotide
  misc_feature (20)..(21): /note="phosphorothioate bond"
  modified_base (21)..(21): 2'-OMe-nucleotide
gugccucgauaacucuggcaa

SEQ ID NO: 1609 - RNA, 21 nt, Artificial Sequence
  source: /note="Description of Artificial Sequence: Synthetic oligonucleotide"
  modified_base (1)..(1): 2'-OMe-nucleotide
  misc_feature (1)..(2): /note="phosphorothioate bond"
  modified_base (2)..(2): 2'-fluoro-nucleotide
  misc_feature (2)..(3): /note="phosphorothioate bond"
  modified_base (3)..(3): 2'-OMe-nucleotide
  modified_base (4)..(4): 2'-OMe-nucleotide
  modified_base (5)..(5): 2'-OMe-nucleotide
  modified_base (6)..(6): 2'-fluoro-nucleotide
  modified_base (7)..(7): 2'-OMe-nucleotide
  modified_base (8)..(8): 2'-OMe-nucleotide
  modified_base (9)..(9): 2'-OMe-nucleotide
  modified_base (10)..(10): 2'-OMe-nucleotide
  modified_base (11)..(11): 2'-OMe-nucleotide
  modified_base (12)..(12): 2'-OMe-nucleotide
  modified_base (13)..(13): 2'-OMe-nucleotide
  modified_base (14)..(14): 2'-fluoro-nucleotide
  modified_base (15)..(15): 2'-OMe-nucleotide
  modified_base (16)..(16): 2'-fluoro-nucleotide
  modified_base (17)..(17): 2'-OMe-nucleotide
  modified_base (18)..(18): 2'-OMe-nucleotide
  modified_base (19)..(19): 2'-OMe-nucleotide
  misc_feature (19)..(20): /note="phosphorothioate bond"
  modified_base (20)..(20): 2'-OMe-nucleotide
  misc_feature (20)..(21): /note="phosphorothioate bond"
  modified_base (21)..(21): 2'-OMe-nucleotide
gugccucgauaacucuggcaa

SEQ ID NO: 1610 - RNA, 21 nt, Artificial Sequence
  source: /note="Description of Artificial Sequence: Synthetic oligonucleotide"
  modified_base (1)..(1): 2'-OMe-nucleotide
  misc_feature (1)..(2): /note="phosphorothioate bond"
  modified_base (2)..(2): 2'-fluoro-nucleotide
  misc_feature (2)..(3): /note="phosphorothioate bond"
  modified_base (3)..(3): 2'-OMe-nucleotide
  modified_base (4)..(4): 2'-fluoro-nucleotide
  modified_base (5)..(5): 2'-OMe-nucleotide
  modified_base (6)..(6): 2'-OMe-nucleotide
  modified_base (7)..(7): 2'-OMe-nucleotide
  modified_base (8)..(8): 2'-fluoro-nucleotide
  modified_base (9)..(9): 2'-fluoro-nucleotide
  modified_base (10)..(10): 2'-OMe-nucleotide
  modified_base (11)..(11): 2'-OMe-nucleotide
  modified_base (12)..(12): 2'-OMe-nucleotide
  modified_base (13)..(13): 2'-OMe-nucleotide
  modified_base (14)..(14): 2'-fluoro-nucleotide
  modified_base (15)..(15): 2'-OMe-nucleotide
  modified_base (16)..(16): 2'-fluoro-nucleotide
  modified_base (17)..(17): 2'-OMe-nucleotide
  modified_base (18)..(18): 2'-OMe-nucleotide
  modified_base (19)..(19): 2'-OMe-nucleotide
  misc_feature (19)..(20): /note="phosphorothioate bond"
  modified_base (20)..(20): 2'-OMe-nucleotide
  misc_feature (20)..(21): /note="phosphorothioate bond"
  modified_base (21)..(21): 2'-OMe-nucleotide
gugccucgauaacucuggcaa

SEQ ID NO: 1611 - RNA, 21 nt, Artificial Sequence
  source: /note="Description of Artificial Sequence: Synthetic oligonucleotide"
  modified_base (1)..(1): 2'-OMe-nucleotide
  misc_feature (1)..(2): /note="phosphorothioate bond"
  modified_base (2)..(2): 2'-fluoro-nucleotide
  misc_feature (2)..(3): /note="phosphorothioate bond"
  modified_base (3)..(3): 2'-OMe-nucleotide
  modified_base (4)..(4): 2'-fluoro-nucleotide
  modified_base (5)..(5): 2'-OMe-nucleotide
  modified_base (6)..(6): 2'-OMe-nucleotide
  modified_base (7)..(7): 2'-OMe-nucleotide
  modified_base (8)..(8): 2'-OMe-nucleotide
  modified_base (9)..(9): 2'-fluoro-nucleotide
  modified_base (10)..(10): 2'-OMe-nucleotide
  modified_base (11)..(11): 2'-OMe-nucleotide
  modified_base (12)..(12): 2'-OMe-nucleotide
  modified_base (13)..(13): 2'-OMe-nucleotide
  modified_base (14)..(14): 2'-fluoro-nucleotide
  modified_base (15)..(15): 2'-OMe-nucleotide
  modified_base (16)..(16): 2'-fluoro-nucleotide
  modified_base (17)..(17): 2'-OMe-nucleotide
  modified_base (18)..(18): 2'-OMe-nucleotide
  modified_base (19)..(19): 2'-OMe-nucleotide
  misc_feature (19)..(20): /note="phosphorothioate bond"
  modified_base (20)..(20): 2'-OMe-nucleotide
  misc_feature (20)..(21): /note="phosphorothioate bond"
  modified_base (21)..(21): 2'-OMe-nucleotide
gugccucgauaacucuggcaa

SEQ ID NO: 1612 - DNA, 21 bp, Artificial Sequence
  source: /note="Description of Artificial Sequence: Synthetic oligonucleotide"
  source: /note="Description of Combined DNA/RNA Molecule: Synthetic oligonucleotide"
  modified_base (1)..(1): 2'-fluoro-nucleotide
  misc_feature (1)..(2): /note="phosphorothioate bond"
  modified_base (2)..(2): 2'-fluoro-nucleotide
  misc_feature (2)..(3): /note="phosphorothioate bond"
  modified_base (3)..(3): 2'-OMe-nucleotide
  modified_base (4)..(4): 2'-fluoro-nucleotide
  modified_base (5)..(5): 2'-OMe-nucleotide
  modified_base (6)..(6): 2'-fluoro-nucleotide
  modified_base (7)..(7): 2'-OMe-nucleotide
  modified_base (8)..(8): 2'-fluoro-nucleotide
  modified_base (9)..(9): 2'-OMe-nucleotide
  modified_base (10)..(10): 2'-fluoro-nucleotide
  modified_base (11)..(11): 2'-OMe-nucleotide
  modified_base (12)..(12): 2'-OMe-nucleotide
  modified_base (13)..(13): 2'-OMe-nucleotide
  modified_base (14)..(14): 2'-fluoro-nucleotide
  modified_base (15)..(15): 2'-OMe-nucleotide
  modified_base (16)..(16): 2'-fluoro-nucleotide
  modified_base (17)..(17): 2'-OMe-nucleotide
  modified_base (18)..(18): 2'-fluoro-nucleotide
  modified_base (19)..(19): 2'-OMe-nucleotide
  misc_feature (19)..(20): /note="phosphorothioate bond"
  modified_base (20)..(20): dT
  misc_feature (20)..(21): /note="phosphorothioate bond"
  modified_base (21)..(21): dT
gugccucgauaacucuggctt

SEQ ID NO: 1613 - RNA, 21 nt, Artificial Sequence
  source: /note="Description of Artificial Sequence: Synthetic oligonucleotide"
  modified_base (1)..(1): 2'-OMe-nucleotide
  misc_feature (1)..(2): /note="phosphorothioate bond"
  modified_base (2)..(2): 2'-fluoro-nucleotide
  misc_feature (2)..(3): /note="phosphorothioate bond"
  modified_base (3)..(3): 2'-OMe-nucleotide
  modified_base (4)..(4): 2'-fluoro-nucleotide
  modified_base (5)..(5): 2'-OMe-nucleotide
  modified_base (6)..(6): 2'-OMe-nucleotide
  modified_base (7)..(7): 2'-OMe-nucleotide
  modified_base (8)..(8): 2'-OMe-nucleotide
  modified_base (9)..(9): 2'-OMe-nucleotide
  modified_base (10)..(10): 2'-OMe-nucleotide
  modified_base (11)..(11): 2'-OMe-nucleotide
  modified_base (12)..(12): 2'-OMe-nucleotide
  modified_base (13)..(13): 2'-OMe-nucleotide
  modified_base (14)..(14): 2'-fluoro-nucleotide
  modified_base (15)..(15): 2'-OMe-nucleotide
  modified_base (16)..(16): 2'-fluoro-nucleotide
  modified_base (17)..(17): 2'-OMe-nucleotide
  modified_base (18)..(18): 2'-OMe-nucleotide
  modified_base (19)..(19): 2'-OMe-nucleotide
  misc_feature (19)..(20): /note="phosphorothioate bond"
  modified_base (20)..(20): Locked nucleic acid (LNA) nucleotide
  misc_feature (20)..(21): /note="phosphorothioate bond"
  modified_base (21)..(21): Locked nucleic acid (LNA) nucleotide
gugccucgauaacucuggcaa

SEQ ID NO: 1614 - RNA, 21 nt, Artificial Sequence
  source: /note="Description of Artificial Sequence: Synthetic oligonucleotide"
  modified_base (1)..(1): 2'-OMe-nucleotide
  misc_feature (1)..(2): /note="phosphorothioate bond"
  modified_base (2)..(2): 2'-fluoro-nucleotide
  misc_feature (2)..(3): /note="phosphorothioate bond"
  modified_base (3)..(3): 2'-OMe-nucleotide
  modified_base (4)..(4): 2'-OMe-nucleotide
  modified_base (5)..(5): 2'-OMe-nucleotide
  modified_base (6)..(6): 2'-fluoro-nucleotide
  modified_base (7)..(7): 2'-OMe-nucleotide
  modified_base (8)..(8): 2'-OMe-nucleotide
  modified_base (9)..(9): 2'-OMe-nucleotide
  modified_base (10)..(10): 2'-OMe-nucleotide
  modified_base (11)..(11): 2'-OMe-nucleotide
  modified_base (12)..(12): 2'-OMe-nucleotide
  modified_base (13)..(13): 2'-OMe-nucleotide
  modified_base (14)..(14): 2'-fluoro-nucleotide
  modified_base (15)..(15): 2'-OMe-nucleotide
  modified_base (16)..(16): 2'-fluoro-nucleotide
  modified_base (17)..(17): 2'-OMe-nucleotide
  modified_base (18)..(18): 2'-OMe-nucleotide
  modified_base (19)..(19): 2'-OMe-nucleotide
  misc_feature (19)..(20): /note="phosphorothioate bond"
  modified_base (20)..(20): Locked nucleic acid (LNA) nucleotide
  misc_feature (20)..(21): /note="phosphorothioate bond"
  modified_base (21)..(21): Locked nucleic acid (LNA) nucleotide
gugccucgauaacucuggcaa

SEQ ID NO: 1615 - RNA, 21 nt, Artificial Sequence
  source: /note="Description of Artificial Sequence: Synthetic oligonucleotide"
  modified_base (1)..(1): 2'-OMe-nucleotide
  misc_feature (1)..(2): /note="phosphorothioate bond"
  modified_base (2)..(2): 2'-fluoro-nucleotide
  misc_feature (2)..(3): /note="phosphorothioate bond"
  modified_base (3)..(3): 2'-OMe-nucleotide
  modified_base (4)..(4): 2'-fluoro-nucleotide
  modified_base (5)..(5): 2'-OMe-nucleotide
  modified_base (6)..(6): 2'-OMe-nucleotide
  modified_base (7)..(7): 2'-OMe-nucleotide
  modified_base (8)..(8): 2'-fluoro-nucleotide
  modified_base (9)..(9): 2'-fluoro-nucleotide
  modified_base (10)..(10): 2'-OMe-nucleotide
  modified_base (11)..(11): 2'-OMe-nucleotide
  modified_base (12)..(12): 2'-OMe-nucleotide
  modified_base (13)..(13): 2'-OMe-nucleotide
  modified_base (14)..(14): 2'-fluoro-nucleotide
  modified_base (15)..(15): 2'-OMe-nucleotide
  modified_base (16)..(16): 2'-fluoro-nucleotide
  modified_base (17)..(17): 2'-OMe-nucleotide
  modified_base (18)..(18): 2'-OMe-nucleotide
  modified_base (19)..(19): 2'-OMe-nucleotide
  misc_feature (19)..(20): /note="phosphorothioate bond"
  modified_base (20)..(20): Locked nucleic acid (LNA) nucleotide
  misc_feature (20)..(21): /note="phosphorothioate bond"
  modified_base (21)..(21): Locked nucleic acid (LNA) nucleotide
gugccucgauaacucuggcaa

SEQ ID NO: 1616 - RNA, 21 nt, Artificial Sequence
  source: /note="Description of Artificial Sequence: Synthetic oligonucleotide"
  modified_base (1)..(1): 2'-OMe-nucleotide
  misc_feature (1)..(2): /note="phosphorothioate bond"
  modified_base (2)..(2): 2'-fluoro-nucleotide
  misc_feature (2)..(3): /note="phosphorothioate bond"
  modified_base (3)..(3): 2'-OMe-nucleotide
  modified_base (4)..(4): 2'-fluoro-nucleotide
  modified_base (5)..(5): 2'-OMe-nucleotide
  modified_base (6)..(6): 2'-OMe-nucleotide
  modified_base (7)..(7): 2'-OMe-nucleotide
  modified_base (8)..(8): 2'-OMe-nucleotide
  modified_base (9)..(9): 2'-fluoro-nucleotide
  modified_base (10)..(10): 2'-OMe-nucleotide
  modified_base (11)..(11): 2'-OMe-nucleotide
  modified_base (12)..(12): 2'-OMe-nucleotide
  modified_base (13)..(13): 2'-OMe-nucleotide
  modified_base (14)..(14): 2'-fluoro-nucleotide
  modified_base (15)..(15): 2'-OMe-nucleotide
  modified_base (16)..(16): 2'-fluoro-nucleotide
  modified_base (17)..(17): 2'-OMe-nucleotide
  modified_base (18)..(18): 2'-OMe-nucleotide
  modified_base (19)..(19): 2'-OMe-nucleotide
  misc_feature (19)..(20): /note="phosphorothioate bond"
  modified_base (20)..(20): Locked nucleic acid (LNA) nucleotide
  misc_feature (20)..(21): /note="phosphorothioate bond"
  modified_base (21)..(21): Locked nucleic acid (LNA) nucleotide
gugccucgauaacucuggcaa

SEQ ID NO: 1617 - RNA, 21 nt, Artificial Sequence
  source: /note="Description of Artificial Sequence: Synthetic oligonucleotide"
  modified_base (1)..(1): 2'-OMe-nucleotide
  misc_feature (1)..(2): /note="phosphorothioate bond"
  modified_base (2)..(2): 2'-fluoro-nucleotide
  misc_feature (2)..(3): /note="phosphorothioate bond"
  modified_base (3)..(3): 2'-OMe-nucleotide
  modified_base (4)..(4): 2'-fluoro-nucleotide
  modified_base (5)..(5): 2'-OMe-nucleotide
  modified_base (6)..(6): 2'-OMe-nucleotide
  modified_base (7)..(7): 2'-OMe-nucleotide
  modified_base (8)..(8): 2'-OMe-nucleotide
  modified_base (9)..(9): 2'-OMe-nucleotide
  modified_base (10)..(10): 2'-OMe-nucleotide
  modified_base (11)..(11): 2'-OMe-nucleotide
  modified_base (12)..(12): 2'-OMe-nucleotide
  modified_base (13)..(13): 2'-OMe-nucleotide
  modified_base (14)..(14): 2'-fluoro-nucleotide
  modified_base (15)..(15): 2'-OMe-nucleotide
  modified_base (16)..(16): 2'-fluoro-nucleotide
  modified_base (17)..(17): 2'-OMe-nucleotide
  modified_base (18)..(18): 2'-OMe-nucleotide
  modified_base (19)..(19): 2'-OMe-nucleotide
  misc_feature (19)..(20): /note="phosphorothioate bond"
  modified_base (20)..(20): 2'-OMe-nucleotide
  misc_feature (20)..(21): /note="phosphorothioate bond"
  modified_base (21)..(21): 2'-OMe-nucleotide
gugccucgauaacucuggcaa

SEQ ID NO: 1618 - RNA, 21 nt, Artificial Sequence
  source: /note="Description of Artificial Sequence: Synthetic oligonucleotide"
  modified_base (1)..(1): 2'-OMe-nucleotide
  misc_feature (1)..(2): /note="phosphorothioate bond"
  modified_base (2)..(2): 2'-fluoro-nucleotide
  misc_feature (2)..(3): /note="phosphorothioate bond"
  modified_base (3)..(3): 2'-OMe-nucleotide
  modified_base (4)..(4): 2'-OMe-nucleotide
  modified_base (5)..(5): 2'-OMe-nucleotide
  modified_base (6)..(6): 2'-fluoro-nucleotide
  modified_base (7)..(7): 2'-OMe-nucleotide
  modified_base (8)..(8): 2'-OMe-nucleotide
  modified_base (9)..(9): 2'-OMe-nucleotide
  modified_base (10)..(10): 2'-OMe-nucleotide
  modified_base (11)..(11): 2'-OMe-nucleotide
  modified_base (12)..(12): 2'-OMe-nucleotide
  modified_base (13)..(13): 2'-OMe-nucleotide
  modified_base (14)..(14): 2'-fluoro-nucleotide
  modified_base (15)..(15): 2'-OMe-nucleotide
  modified_base (16)..(16): 2'-fluoro-nucleotide
  modified_base (17)..(17): 2'-OMe-nucleotide
  modified_base (18)..(18): 2'-OMe-nucleotide
  modified_base (19)..(19): 2'-OMe-nucleotide
  misc_feature (19)..(20): /note="phosphorothioate bond"
  modified_base (20)..(20): 2'-OMe-nucleotide
  misc_feature (20)..(21): /note="phosphorothioate bond"
  modified_base (21)..(21): 2'-OMe-nucleotide
gugccucgauaacucuggcaa

SEQ ID NO: 1619 - RNA, 21 nt, Artificial Sequence
  source: /note="Description of Artificial Sequence: Synthetic oligonucleotide"
  modified_base (1)..(1): 2'-OMe-nucleotide
  misc_feature (1)..(2): /note="phosphorothioate bond"
  modified_base (2)..(2): 2'-fluoro-nucleotide
  misc_feature (2)..(3): /note="phosphorothioate bond"
  modified_base (3)..(3): 2'-OMe-nucleotide
  modified_base (4)..(4): 2'-fluoro-nucleotide
  modified_base (5)..(5): 2'-OMe-nucleotide
  modified_base (6)..(6): 2'-OMe-nucleotide
  modified_base (7)..(7): 2'-OMe-nucleotide
  modified_base (8)..(8): 2'-fluoro-nucleotide
  modified_base (9)..(9): 2'-fluoro-nucleotide
  modified_base (10)..(10): 2'-OMe-nucleotide
  modified_base (11)..(11): 2'-OMe-nucleotide
  modified_base (12)..(12): 2'-OMe-nucleotide
  modified_base (13)..(13): 2'-OMe-nucleotide
  modified_base (14)..(14): 2'-fluoro-nucleotide
  modified_base (15)..(15): 2'-OMe-nucleotide
  modified_base (16)..(16): 2'-fluoro-nucleotide
  modified_base (17)..(17): 2'-OMe-nucleotide
  modified_base (18)..(18): 2'-OMe-nucleotide
  modified_base (19)..(19): 2'-OMe-nucleotide
  misc_feature (19)..(20): /note="phosphorothioate bond"
  modified_base (20)..(20): 2'-OMe-nucleotide
  misc_feature (20)..(21): /note="phosphorothioate bond"
  modified_base (21)..(21): 2'-OMe-nucleotide
gugccucgauaacucuggcaa

SEQ ID NO: 1620 - RNA, 21 nt, Artificial Sequence
  source: /note="Description of Artificial Sequence: Synthetic oligonucleotide"
  modified_base (1)..(1): 2'-OMe-nucleotide
  misc_feature (1)..(2): /note="phosphorothioate bond"
  modified_base (2)..(2): 2'-fluoro-nucleotide
  misc_feature (2)..(3): /note="phosphorothioate bond"
  modified_base (3)..(3): 2'-OMe-nucleotide
  modified_base (4)..(4): 2'-fluoro-nucleotide
  modified_base (5)..(5): 2'-OMe-nucleotide
  modified_base (6)..(6): 2'-OMe-nucleotide
  modified_base (7)..(7): 2'-OMe-nucleotide
  modified_base (8)..(8): 2'-OMe-nucleotide
  modified_base (9)..(9): 2'-fluoro-nucleotide
  modified_base (10)..(10): 2'-OMe-nucleotide
  modified_base (11)..(11): 2'-OMe-nucleotide
  modified_base (12)..(12): 2'-OMe-nucleotide
  modified_base (13)..(13): 2'-OMe-nucleotide
  modified_base (14)..(14): 2'-fluoro-nucleotide
  modified_base (15)..(15): 2'-OMe-nucleotide
  modified_base (16)..(16): 2'-fluoro-nucleotide
  modified_base (17)..(17): 2'-OMe-nucleotide
  modified_base (18)..(18): 2'-OMe-nucleotide
  modified_base (19)..(19): 2'-OMe-nucleotide
  misc_feature (19)..(20): /note="phosphorothioate bond"
  modified_base (20)..(20): 2'-OMe-nucleotide
  misc_feature (20)..(21): /note="phosphorothioate bond"
  modified_base (21)..(21): 2'-OMe-nucleotide
gugccucgauaacucuggcaa

SEQ ID NO: 1621 - DNA, 21 bp, Artificial Sequence
  source: /note="Description of Artificial Sequence: Synthetic oligonucleotide"
  source: /note="Description of Combined DNA/RNA Molecule: Synthetic oligonucleotide"
  modified_base (1)..(1): 2'-fluoro-nucleotide
  misc_feature (1)..(2): /note="phosphorothioate bond"
  modified_base (2)..(2): 2'-fluoro-nucleotide
  misc_feature (2)..(3): /note="phosphorothioate bond"
  modified_base (3)..(3): 2'-OMe-nucleotide
  modified_base (4)..(4): 2'-fluoro-nucleotide
  modified_base (5)..(5): 2'-OMe-nucleotide
  modified_base (6)..(6): 2'-fluoro-nucleotide
  modified_base (7)..(7): 2'-OMe-nucleotide
  modified_base (8)..(8): 2'-fluoro-nucleotide
  modified_base (9)..(9): 2'-OMe-nucleotide
  modified_base (10)..(10): 2'-fluoro-nucleotide
  modified_base (11)..(11): 2'-OMe-nucleotide
  modified_base (12)..(12): 2'-OMe-nucleotide
  modified_base (13)..(13): 2'-OMe-nucleotide
  modified_base (14)..(14): 2'-fluoro-nucleotide
  modified_base (15)..(15): 2'-OMe-nucleotide
  modified_base (16)..(16): 2'-fluoro-nucleotide
  modified_base (17)..(17): 2'-OMe-nucleotide
  modified_base (18)..(18): 2'-fluoro-nucleotide
  modified_base (19)..(19): 2'-OMe-nucleotide
  misc_feature (19)..(20): /note="phosphorothioate bond"
  modified_base (20)..(20): dT
  misc_feature (20)..(21): /note="phosphorothioate bond"
  modified_base (21)..(21): dT
gugccucgauaacucuggctt

SEQ ID NO: 1622 - RNA, 21 nt, Artificial Sequence
  source: /note="Description of Artificial Sequence: Synthetic oligonucleotide"
  modified_base (1)..(1): 2'-OMe-nucleotide
  misc_feature (1)..(2): /note="phosphorothioate bond"
  modified_base (2)..(2): 2'-fluoro-nucleotide
  misc_feature (2)..(3): /note="phosphorothioate bond"
  modified_base (3)..(3): 2'-OMe-nucleotide
  modified_base (4)..(4): 2'-fluoro-nucleotide
  modified_base (5)..(5): 2'-OMe-nucleotide
  modified_base (6)..(6): 2'-OMe-nucleotide
  modified_base (7)..(7): 2'-OMe-nucleotide
  modified_base (8)..(8): 2'-OMe-nucleotide
  modified_base (9)..(9): 2'-OMe-nucleotide
  modified_base (10)..(10): 2'-OMe-nucleotide
  modified_base (11)..(11): 2'-OMe-nucleotide
  modified_base (12)..(12): 2'-OMe-nucleotide
  modified_base (13)..(13): 2'-OMe-nucleotide
  modified_base (14)..(14): 2'-fluoro-nucleotide
  modified_base (15)..(15): 2'-OMe-nucleotide
  modified_base (16)..(16): 2'-fluoro-nucleotide
  modified_base (17)..(17): 2'-OMe-nucleotide
  modified_base (18)..(18): 2'-OMe-nucleotide
  modified_base (19)..(19): 2'-OMe-nucleotide
  misc_feature (19)..(20): /note="phosphorothioate bond"
  modified_base (20)..(20): 2'-OMe-nucleotide
  misc_feature (20)..(21): /note="phosphorothioate bond"
  modified_base (21)..(21): 2'-OMe-nucleotide
gugccucgauaacucuggcaa

SEQ ID NO: 1623 - RNA, 21 nt, Artificial Sequence
  source: /note="Description of Artificial Sequence: Synthetic oligonucleotide"
  modified_base (1)..(1): 2'-OMe-nucleotide
  misc_feature (1)..(2): /note="phosphorothioate bond"
  modified_base (2)..(2): 2'-fluoro-nucleotide
  misc_feature (2)..(3): /note="phosphorothioate bond"
  modified_base (3)..(3): 2'-OMe-nucleotide
  modified_base (4)..(4): 2'-OMe-nucleotide
  modified_base (5)..(5): 2'-OMe-nucleotide
  modified_base (6)..(6): 2'-fluoro-nucleotide
  modified_base (7)..(7): 2'-OMe-nucleotide
  modified_base (8)..(8): 2'-OMe-nucleotide
  modified_base (9)..(9): 2'-OMe-nucleotide
  modified_base (10)..(10): 2'-OMe-nucleotide
  modified_base (11)..(11): 2'-OMe-nucleotide
  modified_base (12)..(12): 2'-OMe-nucleotide
  modified_base (13)..(13): 2'-OMe-nucleotide
  modified_base (14)..(14): 2'-fluoro-nucleotide
  modified_base (15)..(15): 2'-OMe-nucleotide
  modified_base (16)..(16): 2'-fluoro-nucleotide
  modified_base (17)..(17): 2'-OMe-nucleotide
  modified_base (18)..(18): 2'-OMe-nucleotide
  modified_base (19)..(19): 2'-OMe-nucleotide
  misc_feature (19)..(20): /note="phosphorothioate bond"
  modified_base (20)..(20): 2'-OMe-nucleotide
  misc_feature (20)..(21): /note="phosphorothioate bond"
  modified_base (21)..(21): 2'-OMe-nucleotide
gugccucgauaacucuggcaa

SEQ ID NO: 1624 - RNA, 21 nt, Artificial Sequence
  source: /note="Description of Artificial Sequence: Synthetic oligonucleotide"
  modified_base (1)..(1): 2'-OMe-nucleotide
  misc_feature (1)..(2): /note="phosphorothioate bond"
  modified_base (2)..(2): 2'-fluoro-nucleotide
  misc_feature (2)..(3): /note="phosphorothioate bond"
  modified_base (3)..(3): 2'-OMe-nucleotide
  modified_base (4)..(4): 2'-fluoro-nucleotide
  modified_base (5)..(5): 2'-OMe-nucleotide
  modified_base (6)..(6): 2'-OMe-nucleotide
  modified_base (7)..(7): 2'-OMe-nucleotide
  modified_base (8)..(8): 2'-fluoro-nucleotide
  modified_base (9)..(9): 2'-fluoro-nucleotide
  modified_base (10)..(10): 2'-OMe-nucleotide
  modified_base (11)..(11): 2'-OMe-nucleotide
  modified_base (12)..(12): 2'-OMe-nucleotide
  modified_base (13)..(13): 2'-OMe-nucleotide
  modified_base (14)..(14): 2'-fluoro-nucleotide
  modified_base (15)..(15): 2'-OMe-nucleotide
  modified_base (16)..(16): 2'-fluoro-nucleotide
  modified_base (17)..(17): 2'-OMe-nucleotide
  modified_base (18)..(18): 2'-OMe-nucleotide
  modified_base (19)..(19): 2'-OMe-nucleotide
  misc_feature (19)..(20): /note="phosphorothioate bond"
  modified_base (20)..(20): 2'-OMe-nucleotide
  misc_feature (20)..(21): /note="phosphorothioate bond"
  modified_base (21)..(21): 2'-OMe-nucleotide
gugccucgauaacucuggcaa

SEQ ID NO: 1625 - RNA, 21 nt, Artificial Sequence
  source: /note="Description of Artificial Sequence: Synthetic oligonucleotide"
  modified_base (1)..(1): 2'-OMe-nucleotide
  misc_feature (1)..(2): /note="phosphorothioate bond"
  modified_base (2)..(2): 2'-fluoro-nucleotide
  misc_feature (2)..(3): /note="phosphorothioate bond"
  modified_base (3)..(3): 2'-OMe-nucleotide
  modified_base (4)..(4): 2'-fluoro-nucleotide
  modified_base (5)..(5): 2'-OMe-nucleotide
  modified_base (6)..(6): 2'-OMe-nucleotide
  modified_base (7)..(7): 2'-OMe-nucleotide
  modified_base (8)..(8): 2'-OMe-nucleotide
  modified_base (9)..(9): 2'-fluoro-nucleotide
  modified_base (10)..(10): 2'-OMe-nucleotide
  modified_base (11)..(11): 2'-OMe-nucleotide
  modified_base (12)..(12): 2'-OMe-nucleotide
  modified_base (13)..(13): 2'-OMe-nucleotide
  modified_base (14)..(14): 2'-fluoro-nucleotide
  modified_base (15)..(15): 2'-OMe-nucleotide
  modified_base (16)..(16): 2'-fluoro-nucleotide
  modified_base (17)..(17): 2'-OMe-nucleotide
  modified_base (18)..(18): 2'-OMe-nucleotide
  modified_base (19)..(19): 2'-OMe-nucleotide
  misc_feature (19)..(20): /note="phosphorothioate bond"
  modified_base (20)..(20): 2'-OMe-nucleotide
  misc_feature (20)..(21): /note="phosphorothioate bond"
  modified_base (21)..(21): 2'-OMe-nucleotide
  source: /note="C-term hydroxyl group"
gugccucgauaacucuggcaa

SEQ ID NO: 1626 - DNA, 21 bp, Artificial Sequence
  source: /note="Description of Artificial Sequence: Synthetic oligonucleotide"
  source: /note="Description of Combined DNA/RNA Molecule: Synthetic oligonucleotide"
  modified_base (1)..(1): 2'-fluoro-nucleotide
  misc_feature (1)..(2): /note="phosphorothioate bond"
  modified_base (2)..(2): 2'-fluoro-nucleotide
  misc_feature (2)..(3): /note="phosphorothioate bond"
  modified_base (3)..(3): 2'-OMe-nucleotide
  modified_base (4)..(4): 2'-fluoro-nucleotide
  modified_base (5)..(5): 2'-OMe-nucleotide
  modified_base (6)..(6): 2'-fluoro-nucleotide
  modified_base (7)..(7): 2'-OMe-nucleotide
  modified_base (8)..(8): 2'-fluoro-nucleotide
  modified_base (9)..(9): 2'-OMe-nucleotide
  modified_base (10)..(10): 2'-fluoro-nucleotide
  modified_base (11)..(11): 2'-OMe-nucleotide
  modified_base (12)..(12): 2'-OMe-nucleotide
  modified_base (13)..(13): 2'-OMe-nucleotide
  modified_base (14)..(14): 2'-fluoro-nucleotide
  modified_base (15)..(15): 2'-OMe-nucleotide
  modified_base (16)..(16): 2'-fluoro-nucleotide
  modified_base (17)..(17): 2'-OMe-nucleotide
  modified_base (18)..(18): 2'-fluoro-nucleotide
  modified_base (19)..(19): 2'-OMe-nucleotide
  misc_feature (19)..(20): /note="phosphorothioate bond"
  modified_base (20)..(20): dT
  misc_feature (20)..(21): /note="phosphorothioate bond"
  modified_base (21)..(21): dT
gugccucgauaacucuggctt

SEQ ID NO: 1627 - DNA, 6414 bp, Homo sapiens
ctgggattgggacacactttctgggcactgctggccagtcccaaaatggaacataaggaagtggttcttctacttcttttatttctgaaatcagcagcacctgagcaaagccatgtggtccaggattgctaccatggtgatggacagagttatcgaggcacgtactccaccactgtcacaggaaggacctgccaagcttggtcatctatgacaccacatcaacataataggaccacagaaaactacccaaatgctggcttgatcatgaactactgcaggaatccagatgctgtggcagctccttattgttatacgagggatcccggtgtcaggtgggagtactgcaacctgacgcaatgctcagacgcagaagggactgccgtcgcgcctccgactgttaccccggttccaagcctagaggctccttccgaacaagcaccgactgagcaaaggcctggggtgcaggagtgctaccatggtaatggacagagttatcgaggcacatactccaccactgtcacaggaagaacctgccaagcttggtcatctatgacaccacactcgcatagtcggaccccagaatactacccaaatgctggcttgatcatgaactactgcaggaatccagatgctgtggcagctccttattgttatacgagggatcccggtgtcaggtgggagtactgcaacctgacgcaatgctcagacgcagaagggactgccgtcgcgcctccgactgttaccccggttccaagcctagaggctccttccgaacaagcaccgactgagcaaaggcctggggtgcaggagtgctaccatggtaatggacagagttatcgaggcacatactccaccactgtcacaggaagaacctgccaagcttggtcatctatgacaccacactcgcatagtcggaccccagaatactacccaaatgctggcttgatcatgaactactgcaggaatccagatgctgtggcagctccttattgttatacgagggatcccggtgtcaggtgggagtactgcaacctgacgcaatgctcagacgcagaagggactgccgtcgcgcctccgactgttaccccggttccaagcctagaggctccttccgaacaagcaccgactgagcagaggcctggggtgcaggagtgctaccacggtaatggacagagttatcgaggcacatactccaccactgtcactggaagaacctgccaagcttggtcatctatgacaccacactcgcatagtcggaccccagaatactacccaaatgctggcttgatcatgaactactgcaggaatccagatgctgtggcagctccttattgttatacgagggatcccggtgtcaggtgggagtactgcaacctgacgcaatgctcagacgcagaagggactgccgtcgcgcctccgactgttaccccggttccaagcctagaggctccttccgaacaagcaccgactgagcaaaggcctggggtgcaggagtgctaccatggtaatggacagagttatcgaggcacatactccaccactgtcacaggaagaacctgccaagcttggtcatctatgacaccacactcgcatagtcggaccccagaatactacccaaatgctggcttgatcatgaactactgcaggaatccagatgctgtggcagctccttattgttatacgagggatcccggtgtcaggtgggagtactgcaacctgacgcaatgctcagacgcagaagggactgccgtcgcgcctccgactgttaccccggttccaagcctagaggctccttccgaacaagcaccgactgagcaaaggcctggggtgcaggagtgctaccatggtaatggacagagttatcgaggcacatactccaccactgtcacaggaagaacctgccaagcttggtcatctatgacaccacactcgcatagtcggaccccagaatactacccaaatgctggcttgatcatgaactactgcaggaatccagatgctgtggcagctccttattgttatacgagggatcccggtgtcaggtgggagtactgcaacctgacgcaatgctcagacgcagaagggactgccgtcgcgcctccgactgttaccccggttccaagcctagaggctccttccgaacaagcaccgactgagcaaaggcctggggtgcaggagtgctaccatggtaatggacagagttatcgaggcacatactccaccactgtcacaggaagaacctgccaagcttggtcatctatgacaccacactcgcatagtcggaccccagaatactacccaaatgctggcttgatcatgaactactgcaggaatccagatgctgtggcagctccttattgttatacgagggatcccggtgtcaggtgggagtactgcaacctgacgcaatgctcagacgcagaagggactgccgtcgcgcctccgactgttaccccggttccaagcctagaggctccttccgaacaagcaccgactgagcagaggcctggggtgcaggagtgctaccacggtaatggacagagttatcgaggcacatactccaccactgtcactggaagaacctgccaagcttggtcatctatgacaccacactcgcatagtcggaccccagaatactacccaaatgctggcttgatcatgaactactgcaggaatccagatcctgtggcagccccttattgttatacgagggatcccagtgtcaggtgggagtactgcaacctgacacaatgctcagacgcagaagggactgccgtcgcgcctccaactattaccccgattccaagcctagaggctccttctgaacaagcaccaactgagcaaaggcctggggtgcaggagtgctaccacggaaatggacagagttatcaaggcacatacttcattactgtcacaggaagaacctgccaagcttggtcatctatgacaccacactcgcatagtcggaccccagcatactacccaaatgctggcttgatcaagaactactgccgaaatccagatcctgtggcagccccttggtgttatacaacagatcccagtgtcaggtgggagtactgcaacctgacacgatgctcagatgcagaatggactgccttcgtccctccgaatgttattctggctccaagcctagaggctttttttgaacaagcactgactgaggaaacccccggggtacaggactgctactaccattatggacagagttaccgaggcacatactccaccactgtcacaggaagaacttgccaagcttggtcatctatgacaccacaccagcatagtcggaccccagaaaactacccaaatgctggcctgaccaggaactactgcaggaatccagatgctgagattcgcccttggtgttacaccatggatcccagtgtcaggtgggagtactgcaacctgacacaatgcctggtgacagaatcaagtgtccttgcaactctcacggtggtcccagatccaagcacagaggcttcttctgaagaagcaccaacggagcaaagccccggggtccaggattgctaccatggtgatggacagagttatcgaggctcattctctaccactgtcacaggaaggacatgtcagtcttggtcctctatgacaccacactggcatcagaggacaacagaatattatccaaatggtggcctgaccaggaactactgcaggaatccagatgctgagattagtccttggtgttataccatggatcccaatgtcagatgggagtactgcaacctgacacaatgtccagtgacagaatcaagtgtccttgcgacgtccacggctgtttctgaacaagcaccaacggagcaaagccccacagtccaggactgctaccatggtgatggacagagttatcgaggctcattctccaccactgttacaggaaggacatgtcagtcttggtcctctatgacaccacactggcatcagagaaccacagaatactacccaaatggtggcctgaccaggaactactgcaggaatccagatgctgagattcgcccttggtgttataccatggatcccagtgtcagatgggagtactgcaacctgacgcaatgtccagtgatggaatcaactctcctcacaactcccacggtggtcccagttccaagcacagagcttccttctgaagaagcaccaactgaaaacagcactggggtccaggactgctaccgaggtgatggacagagttatcgaggcacactctccaccactatcacaggaagaacatgtcagtcttggtcgtctatgacaccacattggcatcggaggatcccattatactatccaaatgctggcctgaccaggaactactgcaggaatccagatgctgagattcgcccttggtgttacaccatggatcccagtgtcaggtgggagtactgcaacctgacacgatgtccagtgacagaatcgagtgtcctcacaactcccacagtggccccggttccaagcacagaggctccttctgaacaagcaccacctgagaaaagccctgtggtccaggattgctaccatggtgatggacggagttatcgaggcatatcctccaccactgtcacaggaaggacctgtcaatcttggtcatctatgataccacactggcatcagaggaccccagaaaactacccaaatgctggcctgaccgagaactactgcaggaatccagattctgggaaacaaccctggtgttacacaaccgatccgtgtgtgaggtgggagtactgcaatctgacacaatgctcagaaacagaatcaggtgtcctagagactcccactgttgttccagttccaagcatggaggctcattctgaagcagcaccaactgagcaaacccctgtggtccggcagtgctaccatggtaatggccagagttatcgaggcacattctccaccactgtcacaggaaggacatgtcaatcttggtcatccatgacaccacaccggcatcagaggaccccagaaaactacccaaatgatggcctgacaatgaactactgcaggaatccagatgccgatacaggcccttggtgttttaccatggaccccagcatcaggtgggagtactgcaacctgacgcgatgctcagacacagaagggactgtggtcgctcctccgactgtcatccaggttccaagcctagggcctccttctgaacaagactgtatgtttgggaatgggaaaggataccggggcaagaaggcaaccactgttactgggacgccatgccaggaatgggctgcccaggagccccatagacacagcacgttcattccagggacaaataaatgggcaggtctggaaaaaaattactgccgtaaccctgatggtgacatcaatggtccctggtgctacacaatgaatccaagaaaactttttgactactgtgatatccctctctgtgcatcctcttcatttgattgtgggaagcctcaagtggagccgaagaaatgtcctggaagcattgtaggggggtgtgtggcccacccacattcctggccctggcaagtcagtctcagaacaaggtttggaaagcacttctgtggaggcaccttaatatccccagagtgggtgctgactgctgctcactgcttgaagaagtcctcaaggccttcatcctacaaggtcatcctgggtgcacaccaagaagtgaacctcgaatctcatgttcaggaaatagaagtgtctaggctgttcttggagcccacacaagcagatattgccttgctaaagctaagcaggcctgccgtcatcactgacaaagtaatgccagcttgtctgccatccccagactacatggtcaccgccaggactgaatgttacatcactggctggggagaaacccaaggtacctttgggactggccttctcaaggaagcccagctccttgttattgagaatgaagtgtgcaatcactataagtatatttgtgctgagcatttggccagaggcactgacagttgccagggtgacagtggagggcctctggtttgcttcgagaaggacaaatacattttacaaggagtcacttcttggggtcttggctgtgcacgccccaataagcctggtgtctatgctcgtgtttcaaggtttgttacttggattgagggaatgatgagaaataattaattggacgggagacagagtgaagcatcaacctacttagaagctgaaacgtgggtaaggatttagcatgctggaaataatagacagcaatcaaacgaagacactgttcccagctaccagctatgccaaaccttggcatttttggtatttttgtgtataagcttttaaggtctgactgacaaattctgtattaaggtgtcatagctatgacatttgttaaaaataaactctgcacttattttgatttga

SEQ ID NO: 1628 - protein, 2040 aa, Homo sapiens
MEHKEVVLLLLLFLKSAAPEQSHVVQDCYHGDGQSYRGTYSTTVTGRTCQAWSSMTPHQHNRTTENYPNAGLIMNYCRNPDAVAAPYCYTRDPGVRWEYCNLTQCSDAEGTAVAPPTVTPVPSLEAPSEQAPTEQRPGVQECYHGNGQSYRGTYSTTVTGRTCQAWSSMTPHSHSRTPEYYPNAGLIMNYCRNPDAVAAPYCYTRDPGVRWEYCNLTQCSDAEGTAVAPPTVTPVPSLEAPSEQAPTEQRPGVQECYHGNGQSYRGTYSTTVTGRTCQAWSSMTPHSHSRTPEYYPNAGLIMNYCRNPDAVAAPYCYTRDPGVRWEYCNLTQCSDAEGTAVAPPTVTPVPSLEAPSEQAPTEQRPGVQECYHGNGQSYRGTYSTTVTGRTCQAWSSMTPHSHSRTPEYYPNAGLIMNYCRNPDAVAAPYCYTRDPGVRWEYCNLTQCSDAEGTAVAPPTVTPVPSLEAPSEQAPTEQRPGVQECYHGNGQSYRGTYSTTVTGRTCQAWSSMTPHSHSRTPEYYPNAGLIMNYCRNPDAVAAPYCYTRDPGVRWEYCNLTQCSDAEGTAVAPPTVTPVPSLEAPSEQAPTEQRPGVQECYHGNGQSYRGTYSTTVTGRTCQAWSSMTPHSHSRTPEYYPNAGLIMNYCRNPDAVAAPYCYTRDPGVRWEYCNLTQCSDAEGTAVAPPTVTPVPSLEAPSEQAPTEQRPGVQECYHGNGQSYRGTYSTTVTGRTCQAWSSMTPHSHSRTPEYYPNAGLIMNYCRNPDAVAAPYCYTRDPGVRWEYCNLTQCSDAEGTAVAPPTVTPVPSLEAPSEQAPTEQRPGVQECYHGNGQSYRGTYSTTVTGRTCQAWSSMTPHSHSRTPEYYPNAGLIMNYCRNPDPVAAPYCYTRDPSVRWEYCNLTQCSDAEGTAVAPPTITPIPSLEAPSEQAPTEQRPGVQECYHGNGQSYQGTYFITVTGRTCQAWSSMTPHSHSRTPAYYPNAGLIKNYCRNPDPVAAPWCYTTDPSVRWEYCNLTRCSDAEWTAFVPPNVILAPSLEAFFEQALTEETPGVQDCYYHYGQSYRGTYSTTVTGRTCQAWSSMTPHQHSRTPENYPNAGLTRNYCRNPDAEIRPWCYTMDPSVRWEYCNLTQCLVTESSVLATLTVVPDPSTEASSEEAPTEQSPGVQDCYHGDGQSYRGSFSTTVTGRTCQSWSSMTPHWHQRTTEYYPNGGLTRNYCRNPDAEISPWCYTMDPNVRWEYCNLTQCPVTESSVLATSTAVSEQAPTEQSPTVQDCYHGDGQSYRGSFSTTVTGRTCQSWSSMTPHWHQRTTEYYPNGGLTRNYCRNPDAEIRPWCYTMDPSVRWEYCNLTQCPVMESTLLTTPTVVPVPSTELPSEEAPTENSTGVQDCYRGDGQSYRGTLSTTITGRTCQSWSSMTPHWHRRIPLYYPNAGLTRNYCRNPDAEIRPWCYTMDPSVRWEYCNLTRCPVTESSVLTTPTVAPVPSTEAPSEQAPPEKSPVVQDCYHGDGRSYRGISSTTVTGRTCQSWSSMIPHWHQRTPENYPNAGLTENYCRNPDSGKQPWCYTTDPCVRWEYCNLTQCSETESGVLETPTVVPVPSMEAHSEAAPTEQTPVVRQCYHGNGQSYRGTFSTTVTGRTCQSWSSMTPHRHQRTPENYPNDGLTMNYCRNPDADTGPWCFTMDPSIRWEYCNLTRCSDTEGTVVAPPTVIQVPSLGPPSEQDCMFGNGKGYRGKKATTVTGTPCQEWAAQEPHRHSTFIPGTNKWAGLEKNYCRNPDGDINGPWCYTMNPRKLFDYCDIPLCASSSFDCGKPQVEPKKCPGSIVGGCVAHPHSWPWQVSLRTRFGKHFCGGTLISPEWVLTAAHCLKKSSRPSSYKVILGAHQEVNLESHVQEIEVSRLFLEPTQADIALLKLSRPAVITDKVMPACLPSPDYMVTARTECYITGWGETQGTFGTGLLKEAQLLVIENEVCNHYKYICAEHLARGTDSCQGDSGGPLVCFEKDKYILQGVTSWGLGCARPNKPGVYARVSRFVTWIEGMMRNN

SEQ ID NO: 1629 - DNA, 5387 bp, Macaca fascicularis
gatgctgcatacttaatgtcgaaaggttgcttcatccaagagcctggagttttcagagacactgtcctgaaactatgtcctgaaactatgtcattgaaactgaaacattgtcctgaagctggtattgggcaataccagcgcctgcaggcaacagctcggatgcacttaagatttaaatattacccacagaagttctggcttgtctgggaaaaccttttgctaaacagaagagcaacatttttttttttttcttttctggaatttgtaaacagcatttattctcagccttaccttccaaacgttgcacttggaacattgctgggccccgtggaaacagaagcgaacgtcagccaggccggcagggggcggcagaccccacacttcgccgggcgccctcacctccctgggagggagtgtgcagctgccaaaatcttcggcggggttcagtccaagcgacttcagccagcagatggtcattctcctgtgaccgtgtgtactacagactgtttcaaaaccgggcaggcaattaacaatgggaattctgccatcatcgctgacaaagtcatcccagtttgtctgccatccccaaattatgtggtcgccaaccagactgaatgttatgtcactggctggggagaaacccaagcactacctgagcaaagccatgtggtccaggattgctaccatggtgatggacagagttatcaaggcacatcctccaccactgtcacaggaaggacctgccaagcttggtcatctatggaaccacatcagcataatagaaccacagaaaactacccaaatgctggcttgatcaggaactactgcaggaatccagatcctgtggcagccccttattgttatacgatggatcccaatgtcaggtgggagtactgcaacctgacacaatgctcagacgcagaagggactgccgtcgcacctccgaatgtcaccccggttccaagcctagaggctccttccgaacaagcaccgactgagcaaaggcctggggtgcaggagtgctaccacggtaatggacagagttatcgaggcacatacttcaccactgtgacaggaagaacctgccaagcttggtcatctatgacaccgcactctcatagtcggaccccggaaaactacccaaatggtggcttgatcaggaactactgcaggaatccagatcctgtggcagccccttattgttataccatggatcccaatgtcaggtgggagtactgcaacctgacacaatgctcagacgcagaagggattgccgtcacacctctgactgttaccccggttccaagcctagaggctccttccaagcaagcaccaactgagcaaaggcctggtgtccaggagtgctaccacggtaatggacagagttatcgaggcacatacttcaccactgtgacaggaagaacctgccaagcttggtcatctatgacaccacattctcatagtcgtaccccagaaaactacccaaatggtggcttgatcaggaactactgcaggaatccagatcctgtggcagccccttattgttataccatggatcccaatgtcaggtgggagtactgcaacctgacacaatgctcagacgcagaagggactgccgtcgcacctccgactgtcaccccggttccaagcctagaggctccttccgaacaagcaccgactgagcaaaggcctggggtgcaggagtgctaccacggtaatggacagagttatcgaggcacatacttcaccactgtgacaggaagaacctgccaagcttggtcatctatgacaccgcactctcatagtcggaccccggaaaactacccaaatggtggcttgatcaggaactactgcaggaatccagatcctgtggcagccccttattgttataccatggatcccaatgtcaggtgggagtactgcaacctgacacaatgctcagacgcagaagggactgccgtcgcacctccgaatgtcaccccggttccaagcctagaggctccttctgagcaagcaccaactgagcaaaggcttggggtgcaggagtgctaccacggtaatggacagagttatcgaggcacatacttcaccactgtgacaggaagaacctgccaagcttggtcatctatgacaccacactctcatagtcggaccccagaaaactacccaaatgctggcttggtcaagaactactgccgaaatccagatcctgtggcagccccttggtgttatacaacggatcccagtgtcaggtgggagtactgcaacctgacacgatgctcagatgcagaagggactgctgttgtgcctccaaatattattccggttccaagcctagaggcttttcttgaacaagaaccgactgaggaaacccccggggtacaggagtgctactaccattatggacagagttatagaggcacatactccaccactgttacaggaagaacttgccaagcttggtcatctatgacaccacaccagcatagtcggaccccaaaaaactatccaaatgctggcctgaccaggaactactgcaggaatccagatgctgagattcgcccttggtgttataccatggatcccagtgtcaggtgggagtactgcaacctgacacaatgtctggtgacagaatcaagtgtccttgaaactctcacagtggtcccagatccaagcacacaggcttcttctgaagaagcaccaacggagcaaagtcccgaggtccaggactgctaccatggtgatggacagagttatcgaggctcattctccaccactgtcacaggaaggacatgtcagtcttggtcctctatgacaccacactggcatcagaggacaacagaatattatccagatggtggcctgaccaggaactactgcaggaatccagatgctgagattcgcccttggtgttataccatggatcccagtgtcaggtgggagtactgcaacctgacacaatgtccagtgacagaatcaagtgtcctcgcaacgtccatggctgtttctgaacaagcaccaatggagcaaagccccggggtccaggactgctaccatggtgatggacagagttatcgaggttcattctccaccactgtcacaggaaggacatgtcagtcttggtcctctatgacaccacactggcatcagaggaccatagaatactacccaaatggtggcctgaccaagaactactgcaggaatccagatgctgagattcgcccttggtgttataccatggatcccagagtcagatgggagtactgcaacctgacacaatgtgtggtgatggaatcaagtgtccttgcaactcccatggtggtcccagttccaagcagagaggttccttctgaagaagcaccaactgaaaacagccctggggtccaggactgctaccaaggtgatggacagagttatcgaggcacattctccaccactatcacaggaagaacatgtcagtcttggttgtctatgacaccacatcggcatcggaggatcccattacgctatccaaatgctggcctgaccaggaactattgcagaaatccagatgctgagattcgcccttggtgttacaccatggatcccagtgtcaggtgggagtactgcaacctgacacaatgtccagtgacagaatcaagtgtcctcacaactcccacggtggtcccggttccaagcacagaggctccttctgaacaagcaccacctgagaaaagccctgtggtccaggattgctaccatggtgatggacagagttatcgaggcacatcctccaccactgtcacaggaaggaactgtcagtcttggtcatctatgataccacactggcatcagaggaccccagaaaactacccaaatgctggcctgaccaggaactactgcaggaatccagattctgggaaacaaccctggtgttacacgactgatccatgtgtgaggtgggagtactgcaacctgacacaatgctcagaaacagaatcaggtgtcctagagactcccactgttgttccggttccaagcatggaagctcattctgaagcagcaccaactgagcaaactcctgtggtccagcagtgctaccatggtaatggacagagttatcgaggcacattctccaccactgtcacaggaaggacatgtcaatcttggtcatccatgacaccacaccagcataagaggaccccggaaaaccacccaaatgatgacttgacaatgaactactgcaggaatccagatgctgacacaggcccttggtgttttaccatggaccccagcgtcaggcgggagtactgcaacctgacgcgatgctcagacacagaagggactgtggtcacacctccgactgttatcccggttccaagcctagaggctccttctgaacaagcatcctcttcatttgattgtgggaagcctcaagtggagccaaagaaatgtcctggaagcattgtaggtgggtgtgtggcccacccacattcctggccctggcaagtcagtcttagaacaaggtttggaaagcacttctgtggaggcaccttaatatccccagagtgggtgctgactgctgcttgctgcttggagacgttctcaaggccttccttctacaaggtcatcctgggtgcacaccaagaagtgaatctcgaatctcacgttcaagaaatagaagtgtctaggttgttcttggagcccataggagcagatattgccttgctaaagctaagcaggcctgccatcatcactgacaaagtaatcccagcctgtctgccgtctccaaattacgtgatcaccgtctggactgaatgttacatcactggctggggagaaacccaaggtacctttggggctggccttctcaaggaagcccagcttcatgtgattgagaatacagtgtgcaatcactacgagtttctgaatggaagagtcaaatccaccgagctctgtgctgggcatttggccggaggcactgacagatgccagggtgacagtggagggcctgtggtttgcttcgacaaggacaaatacattttacgaggaataacttcttggggtcctggctgtgcatgccccaataagcctggtgtctatgttcgtgtttcaagctttgtcacttggattgagggagtgatgagaaataattaattgaacaagagacagagtgaagcattgactcacctagaggctagaatgggggtagggatttagcacgctggaaataacggacagtaatcaaacgaagacactgtccccagctaccaactatgccaaacctcagcatttttggtattattgtgtataagcttttcccgtctgactgctgggttctccaataaggtgacatagctatgccatttgttaaaaataaactctgtacttattttgatttgagtaaa

SEQ ID NO: 1630 - protein, 1706 aa, Macaca fascicularis
MSKGCFIQEPGVFRDTVLKLCPETMSLKLKHCPEAGIGQYQRLQATARMHLRFKYYPQKFWLVWENLLLNRRATFFFFSFLEFVNSIYSQPYLPNVALGTLLGPVETEANVSQAGRGRQTPHFAGRPHLPGRECAAAKIFGGVQSKRLQPADGHSPVTVCTTDCFKTGQAINNGNSAIIADKVIPVCLPSPNYVVANQTECYVTGWGETQALPEQSHVVQDCYHGDGQSYQGTSSTTVTGRTCQAWSSMEPHQHNRTTENYPNAGLIRNYCRNPDPVAAPYCYTMDPNVRWEYCNLTQCSDAEGTAVAPPNVTPVPSLEAPSEQAPTEQRPGVQECYHGNGQSYRGTYFTTVTGRTCQAWSSMTPHSHSRTPENYPNGGLIRNYCRNPDPVAAPYCYTMDPNVRWEYCNLTQCSDAEGIAVTPLTVTPVPSLEAPSKQAPTEQRPGVQECYHGNGQSYRGTYFTTVTGRTCQAWSSMTPHSHSRTPENYPNGGLIRNYCRNPDPVAAPYCYTMDPNVRWEYCNLTQCSDAEGTAVAPPTVTPVPSLEAPSEQAPTEQRPGVQECYHGNGQSYRGTYFTTVTGRTCQAWSSMTPHSHSRTPENYPNGGLIRNYCRNPDPVAAPYCYTMDPNVRWEYCNLTQCSDAEGTAVAPPNVTPVPSLEAPSEQAPTEQRLGVQECYHGNGQSYRGTYFTTVTGRTCQAWSSMTPHSHSRTPENYPNAGLVKNYCRNPDPVAAPWCYTTDPSVRWEYCNLTRCSDAEGTAVVPPNIIPVPSLEAFLEQEPTEETPGVQECYYHYGQSYRGTYSTTVTGRTCQAWSSMTPHQHSRTPKNYPNAGLTRNYCRNPDAEIRPWCYTMDPSVRWEYCNLTQCLVTESSVLETLTVVPDPSTQASSEEAPTEQSPEVQDCYHGDGQSYRGSFSTTVTGRTCQSWSSMTPHWHQRTTEYYPDGGLTRNYCRNPDAEIRPWCYTMDPSVRWEYCNLTQCPVTESSVLATSMAVSEQAPMEQSPGVQDCYHGDGQSYRGSFSTTVTGRTCQSWSSMTPHWHQRTIEYYPNGGLTKNYCRNPDAEIRPWCYTMDPRVRWEYCNLTQCVVMESSVLATPMVVPVPSREVPSEEAPTENSPGVQDCYQGDGQSYRGTFSTTITGRTCQSWLSMTPHRHRRIPLRYPNAGLTRNYCRNPDAEIRPWCYTMDPSVRWEYCNLTQCPVTESSVLTTPTVVPVPSTEAPSEQAPPEKSPVVQDCYHGDGQSYRGTSSTTVTGRNCQSWSSMIPHWHQRTPENYPNAGLTRNYCRNPDSGKQPWCYTTDPCVRWEYCNLTQCSETESGVLETPTVVPVPSMEAHSEAAPTEQTPVVQQCYHGNGQSYRGTFSTTVTGRTCQSWSSMTPHQHKRTPENHPNDDLTMNYCRNPDADTGPWCFTMDPSVRREYCNLTRCSDTEGTVVTPPTVIPVPSLEAPSEQASSSFDCGKPQVEPKKCPGSIVGGCVAHPHSWPWQVSLRTRFGKHFCGGTLISPEWVLTAACCLETFSRPSFYKVILGAHQEVNLESHVQEIEVSRLFLEPIGADIALLKLSRPAIITDKVIPACLPSPNYVITVWTECYITGWGETQGTFGAGLLKEAQLHVIENTVCNHYEFLNGRVKSTELCAGHLAGGTDRCQGDSGGPVVCFDKDKYILRGITSWGPGCACPNKPGVYVRVSSFVTWIEGVMRNN

SEQ ID NO: 1631 - DNA, 16 bp, Artificial Sequence
  source: /note="Description of Artificial Sequence: Synthetic oligonucleotide"
  modified_base (1)..(16): dT
tttttttttttttttt

SEQ ID NO: 1632 - DNA, 6489 bp, Homo sapiens
  source: NM_005577.2
aggtacctttggggctggctttctcaaggaagcccagctccctgtgattgagaatgaagtgtgcaatcgctatgactgggattgggacacactttctgggcactgctggccagtcccaaaatggaacataaggaagtggttcttctacttcttttatttctgaaatcagcagcacctgagcaaagccatgtggtccaggattgctaccatggtgatggacagagttatcgaggcacgtactccaccactgtcacaggaaggacctgccaagcttggtcatctatgacaccacatcaacataataggaccacagaaaactacccaaatgctggcttgatcatgaactactgcaggaatccagatgctgtggcagctccttattgttatacgagggatcccggtgtcaggtgggagtactgcaacctgacgcaatgctcagacgcagaagggactgccgtcgcgcctccgactgttaccccggttccaagcctagaggctccttccgaacaagcaccgactgagcaaaggcctggggtgcaggagtgctaccatggtaatggacagagttatcgaggcacatactccaccactgtcacaggaagaacctgccaagcttggtcatctatgacaccacactcgcatagtcggaccccagaatactacccaaatgctggcttgatcatgaactactgcaggaatccagatgctgtggcagctccttattgttatacgagggatcccggtgtcaggtgggagtactgcaacctgacgcaatgctcagacgcagaagggactgccgtcgcgcctccgactgttaccccggttccaagcctagaggctccttccgaacaagcaccgactgagcaaaggcctggggtgcaggagtgctaccatggtaatggacagagttatcgaggcacatactccaccactgtcacaggaagaacctgccaagcttggtcatctatgacaccacactcgcatagtcggaccccagaatactacccaaatgctggcttgatcatgaactactgcaggaatccagatgctgtggcagctccttattgttatacgagggatcccggtgtcaggtgggagtactgcaacctgacgcaatgctcagacgcagaagggactgccgtcgcgcctccgactgttaccccggttccaagcctagaggctccttccgaacaagcaccgactgagcagaggcctggggtgcaggagtgctaccacggtaatggacagagttatcgaggcacatactccaccactgtcactggaagaacctgccaagcttggtcatctatgacaccacactcgcatagtcggaccccagaatactacccaaatgctggcttgatcatgaactactgcaggaatccagatgctgtggcagctccttattgttatacgagggatcccggtgtcaggtgggagtactgcaacctgacgcaatgctcagacgcagaagggactgccgtcgcgcctccgactgttaccccggttccaagcctagaggctccttccgaacaagcaccgactgagcaaaggcctggggtgcaggagtgctaccatggtaatggacagagttatcgaggcacatactccaccactgtcacaggaagaacctgccaagcttggtcatctatgacaccacactcgcatagtcggaccccagaatactacccaaatgctggcttgatcatgaactactgcaggaatccagatgctgtggcagctccttattgttatacgagggatcccggtgtcaggtgggagtactgcaacctgacgcaatgctcagacgcagaagggactgccgtcgcgcctccgactgttaccccggttccaagcctagaggctccttccgaacaagcaccgactgagcaaaggcctggggtgcaggagtgctaccatggtaatggacagagttatcgaggcacatactccaccactgtcacaggaagaacctgccaagcttggtcatctatgacaccacactcgcatagtcggaccccagaatactacccaaatgctggcttgatcatgaactactgcaggaatccagatgctgtggcagctccttattgttatacgagggatcccggtgtcaggtgggagtactgcaacctgacgcaatgctcagacgcagaagggactgccgtcgcgcctccgactgttaccccggttccaagcctagaggctccttccgaacaagcaccgactgagcaaaggcctggggtgcaggagtgctaccatggtaatggacagagttatcgaggcacatactccaccactgtcacaggaagaacctgccaagcttggtcatctatgacaccacactcgcatagtcggaccccagaatactacccaaatgctggcttgatcatgaactactgcaggaatccagatgctgtggcagctccttattgttatacgagggatcccggtgtcaggtgggagtactgcaacctgacgcaatgctcagacgcagaagggactgccgtcgcgcctccgactgttaccccggttccaagcctagaggctccttccgaacaagcaccgactgagcagaggcctggggtgcaggagtgctaccacggtaatggacagagttatcgaggcacatactccaccactgtcactggaagaacctgccaagcttggtcatctatgacaccacactcgcatagtcggaccccagaatactacccaaatgctggcttgatcatgaactactgcaggaatccagatcctgtggcagccccttattgttatacgagggatcccagtgtcaggtgggagtactgcaacctgacacaatgctcagacgcagaagggactgccgtcgcgcctccaactattaccccgattccaagcctagaggctccttctgaacaagcaccaactgagcaaaggcctggggtgcaggagtgctaccacggaaatggacagagttatcaaggcacatacttcattactgtcacaggaagaacctgccaagcttggtcatctatgacaccacactcgcatagtcggaccccagcatactacccaaatgctggcttgatcaagaactactgccgaaatccagatcctgtggcagccccttggtgttatacaacagatcccagtgtcaggtgggagtactgcaacctgacacgatgctcagatgcagaatggactgccttcgtccctccgaatgttattctggctccaagcctagaggctttttttgaacaagcactgactgaggaaacccccggggtacaggactgctactaccattatggacagagttaccgaggcacatactccaccactgtcacaggaagaacttgccaagcttggtcatctatgacaccacaccagcatagtcggaccccagaaaactacccaaatgctggcctgaccaggaactactgcaggaatccagatgctgagattcgcccttggtgttacaccatggatcccagtgtcaggtgggagtactgcaacctgacacaatgcctggtgacagaatcaagtgtccttgcaactctcacggtggtcccagatccaagcacagaggcttcttctgaagaagcaccaacggagcaaagccccggggtccaggattgctaccatggtgatggacagagttatcgaggctcattctctaccactgtcacaggaaggacatgtcagtcttggtcctctatgacaccacactggcatcagaggacaacagaatattatccaaatggtggcctgaccaggaactactgcaggaatccagatgctgagattagtccttggtgttataccatggatcccaatgtcagatgggagtactgcaacctgacacaatgtccagtgacagaatcaagtgtccttgcgacgtccacggctgtttctgaacaagcaccaacggagcaaagccccacagtccaggactgctaccatggtgatggacagagttatcgaggctcattctccaccactgttacaggaaggacatgtcagtcttggtcctctatgacaccacactggcatcagagaaccacagaatactacccaaatggtggcctgaccaggaactactgcaggaatccagatgctgagattcgcccttggtgttataccatggatcccagtgtcagatgggagtactgcaacctgacgcaatgtccagtgatggaatcaactctcctcacaactcccacggtggtcccagttccaagcacagagcttccttctgaagaagcaccaactgaaaacagcactggggtccaggactgctaccgaggtgatggacagagttatcgaggcacactctccaccactatcacaggaagaacatgtcagtcttggtcgtctatgacaccacattggcatcggaggatcccattatactatccaaatgctggcctgaccaggaactactgcaggaatccagatgctgagattcgcccttggtgttacaccatggatcccagtgtcaggtgggagtactgcaacctgacacgatgtccagtgacagaatcgagtgtcctcacaactcccacagtggccccggttccaagcacagaggctccttctgaacaagcaccacctgagaaaagccctgtggtccaggattgctaccatggtgatggacggagttatcgaggcatatcctccaccactgtcacaggaaggacctgtcaatcttggtcatctatgataccacactggcatcagaggaccccagaaaactacccaaatgctggcctgaccgagaactactgcaggaatccagattctgggaaacaaccctggtgttacacaaccgatccgtgtgtgaggtgggagtactgcaatctgacacaatgctcagaaacagaatcaggtgtcctagagactcccactgttgttccagttccaagcatggaggctcattctgaagcagcaccaactgagcaaacccctgtggtccggcagtgctaccatggtaatggccagagttatcgaggcacattctccaccactgtcacaggaaggacatgtcaatcttggtcatccatgacaccacaccggcatcagaggaccccagaaaactacccaaatgatggcctgacaatgaactactgcaggaatccagatgccgatacaggcccttggtgttttaccatggaccccagcatcaggtgggagtactgcaacctgacgcgatgctcagacacagaagggactgtggtcgctcctccgactgtcatccaggttccaagcctagggcctccttctgaacaagactgtatgtttgggaatgggaaaggataccggggcaagaaggcaaccactgttactgggacgccatgccaggaatgggctgcccaggagccccatagacacagcacgttcattccagggacaaataaatgggcaggtctggaaaaaaattactgccgtaaccctgatggtgacatcaatggtccctggtgctacacaatgaatccaagaaaactttttgactactgtgatatccctctctgtgcatcctcttcatttgattgtgggaagcctcaagtggagccgaagaaatgtcctggaagcattgtaggggggtgtgtggcccacccacattcctggccctggcaagtcagtctcagaacaaggtttggaaagcacttctgtggaggcaccttaatatccccagagtgggtgctgactgctgctcactgcttgaagaagtcctcaaggccttcatcctacaaggtcatcctgggtgcacaccaagaagtgaacctcgaatctcatgttcaggaaatagaagtgtctaggctgttcttggagcccacacaagcagatattgccttgctaaagctaagcaggcctgccgtcatcactgacaaagtaatgccagcttgtctgccatccccagactacatggtcaccgccaggactgaatgttacatcactggctggggagaaacccaaggtacctttgggactggccttctcaaggaagcccagctccttgttattgagaatgaagtgtgcaatcactataagtatatttgtgctgagcatttggccagaggcactgacagttgccagggtgacagtggagggcctctggtttgcttcgagaaggacaaatacattttacaaggagtcacttcttggggtcttggctgtgcacgccccaataagcctggtgtctatgctcgtgtttcaaggtttgttacttggattgagggaatgatgagaaataattaattggacgggagacagagtgaagcatcaacctacttagaagctgaaacgtgggtaaggatttagcatgctggaaataatagacagcaatcaaacgaagacactgttcccagctaccagctatgccaaaccttggcatttttggtatttttgtgtataagcttttaaggtctgactgacaaattctgtattaaggtgtcatagctatgacatttgttaaaaataaactctgcacttattttgatttga

1. A double-stranded ribonucleic acid (dsRNA) that inhibits expression of a human LPA gene by targeting a target sequence on an RNA transcript of the LPA gene, wherein the dsRNA comprises a sense strand comprising a sense sequence, and an antisense strand comprising an antisense sequence, and wherein the target sequence is nucleotides 2958-2976, 4639-4657, 4892-5000, 220-238, 223-241, 302-320, 1236-1254, 2946-2964, 2953-2971, 2954-2972, 2959-2977, 4635-4653, 4636-4654, 4842-4860, 4980-4998, 6385-6403, or 6470-6488 of SEQ ID NO: 1632, and wherein the sense sequence is at least 90% identical to the target sequence.

2. The dsRNA of claim 1, wherein the sense strand and antisense strand are complementary to each other over a region of 15-25 contiguous nucleotides.

3. The dsRNA of any one of claim 1 or 2, wherein the sense strand and the antisense strand are no more than 30 nucleotides in length.

4. The dsRNA of any one of claims 1 to 3, wherein the target sequence is nucleotides 2958-2976, 4639-4657, or 4982-5000 of SEQ ID NO: 1632.

5. The dsRNA of any one of claims 1 to 4, wherein the dsRNA comprises an antisense sequence that is at least 90% identical to a nucleotide sequence selected from the group consisting of SEQ ID NOs: 303, 306, 318, 389, 403, 406, 407, 409, 410, 467, 468, 471, 499, 520, 522, 578, and 597.

6. The dsRNA of claim 1, wherein the sense sequence and the antisense sequence are complementary, wherein:
a) the sense sequence comprises a nucleotide sequence selected from the group consisting of SEQ ID NOs: 4, 7, 19, 90, 104, 107, 108, 110, 111, 168, 169, 172, 200, 221, 223, 279, and 298; or
b) the antisense sequence comprises a nucleotide sequence selected from the group consisting of SEQ ID NOs: 303, 306, 318, 389, 403, 406, 407, 409, 410, 467, 468, 471, 499, 520, 522, 578, and 597.

7. The dsRNA of claim 6, wherein the sense strand and antisense strand of the dsRNA respectively comprise the nucleotide sequences of:
a) SEQ ID NOs: 4 and 303;
b) SEQ ID NOs: 7 and 306;
c) SEQ ID NOs: 19 and 318;
d) SEQ ID NOs: 90 and 389;
e) SEQ ID NOs: 104 and 403;
f) SEQ ID NOs: 107 and 406;
g) SEQ ID NOs: 108 and 407;
h) SEQ ID NOs: 110 and 409;
i) SEQ ID NOs: 111 and 410;
j) SEQ ID NOs: 168 and 467;
k) SEQ ID NOs: 169 and 468;
l) SEQ ID NOs: 172 and 471;
m) SEQ ID NOs: 200 and 499;
n) SEQ ID NOs: 221 and 520;
o) SEQ ID NOs: 223 and 522;
p) SEQ ID NOs: 279 and 578; or
q) SEQ ID NOs: 298 and 597.

8. The dsRNA of claim 7, wherein the sense strand and antisense strand of the dsRNA respectively comprise the nucleotide sequences of:
a) SEQ ID NOs: 110 and 409;
b) SEQ ID NOs: 172 and 471; or
c) SEQ ID NOs: 223 and 522.

9. The dsRNA of any one of claims 1 to 8, wherein the dsRNA comprises one or more modified nucleotides, wherein at least one of the one or more modified nucleotides is 2′-deoxy-2′-fluoro-ribonucleotide, 2′-deoxyribonucleotide, or 2′-O-methyl-ribonucleotide.

10. The dsRNA of any one of claims 1 to 9, wherein the dsRNA comprises an inverted 2′-deoxyribonucleotide at the 3′-end of its sense or antisense strand.

11. The dsRNA of any one of claims 1 to 10, wherein one or both of the sense strand and the antisense strand further comprise:
a) a 5′ overhang comprising one or more nucleotides; and/or
b) a 3′ overhang comprising one or more nucleotides.

12. The dsRNA of claim 11, wherein an overhang in the dsRNA comprises two or three nucleotides.

13. The dsRNA of claim 11 or 12, wherein an overhang in the dsRNA comprises one or more thymines.

14. The dsRNA of any one of claim 1 to −13, wherein the sense sequence and the antisense sequence comprise alternating 2′-O-methyl ribonucleotides and 2′-deoxy-2′-fluoro ribonucleotides.

15. The dsRNA of claim 1, wherein:
a) the sense strand comprises a nucleotide sequence selected from the group consisting of SEQ ID NOs: 602, 605, 617, 688, 702, 705, 706, 708, 709, 766, 767, 770, 798, 819, 821, 877, and 896; or
b) the antisense strand comprises a nucleotide sequence selected from the group consisting of SEQ ID NOs: 901, 904, 916, 987, 1001, 1004, 1005, 1007, 1008, 1065, 1066, 1069, 1097, 1118, 1120, 1176, and 1195.

16. The dsRNA of claim 15, wherein:
a) the sense strand comprises a nucleotide sequence selected from the group consisting of SEQ ID NOs:708, 770, and 821; or
b) the antisense strand comprises a nucleotide sequence selected from the group consisting of SEQ ID NOs: 1007, 1069, and 1120.

17. The dsRNA of claim 16, wherein the sense strand and antisense strand of the dsRNA respectively comprise the nucleotide sequences of:
a) SEQ ID NOs: 602 and 901;
b) SEQ ID NOs: 605 and 904;
c) SEQ ID NOs: 617 and 916;
d) SEQ ID NOs: 688 and 987;
e) SEQ ID NOs: 702 and 1001;
f) SEQ ID NOs: 705 and 1004;
g) SEQ ID NOs: 706 and 1005;
h) SEQ ID NOs: 708 and 1007;
i) SEQ ID NOs: 709 and 1008;
j) SEQ ID NOs: 766 and 1065;
k) SEQ ID NOs: 767 and 1066;
l) SEQ ID NOs: 770 and 1069;
m) SEQ ID NOs: 798 and 1097;
n) SEQ ID NOs: 819 and 1118;
o) SEQ ID NOs: 821 and 1120;
p) SEQ ID NOs: 877 and 1176; or
q) SEQ ID NOs: 896 and 1195.

18. The dsRNA of claim 17, wherein the sense strand and antisense strand of the dsRNA respectively comprise the nucleotide sequences of:
a) SEQ ID NOs: 708 and 1007;
b) SEQ ID NOs: 770 and 1069; or
c) SEQ ID NOs: 821 and 1120.

19. The dsRNA of any one of claims 1 to 18, wherein the dsRNA is conjugated to one or more ligands with or without a linker.

20. The dsRNA of claim 19, wherein the ligand is N-acetylgalactosamine (GalNAc) and the dsRNA is conjugated to one or more GalNAc.

21. The dsRNA of any one of claims 1 to 20, wherein the dsRNA is a small interfering RNA (siRNA).

22. The dsRNA of any one of claims 1 to 21, wherein one or both strands of the dsRNA comprise one or more compounds having the structure of [chemical structure]
wherein:
B is a heterocyclic nucleobase,
one of L1 and L2 is an internucleoside linking group linking the compound of formula (I) to said strand(s) and the other of L1 and L2 is H, a protecting group, a phosphorus moiety or an internucleoside linking group linking the compound of formula (I) to said strand(s),
Y is O, NH, NR1 or N—C(═O)—R1, wherein R1 is:
a (C1-C20) alkyl group, optionally substituted by one or more groups selected from an halogen atom, a (C1-C6) alkyl group, a (C3-C8) cycloalkyl group, a (C3-C14) heterocycle, a (C6-C14) aryl group, a (C5-C14) heteroaryl group, —O—Z1, —N(Z1)(Z2), —S—Z1, —CN, —C(=J)-O—Z1, —O—C(=J)-Z1, —C(=J)-N(Z1)(Z2), and —N(Z1)-C(=J)-Z2, wherein
J is O or S,
each of Z1 and Z2 is, independently, H, a (C1-C6) alkyl group, optionally substituted by one or more groups selected from a halogen atom and a (C1-C6) alkyl group,
a (C3-C8) cycloalkyl group, optionally substituted by one or more groups selected from a halogen atom and a (C1-C6) alkyl group,
a group —[C(═O)]m-R2-(O—CH₂—CH₂)p-R3, wherein
m is an integer meaning 0 or 1,
p is an integer ranging from 0 to 10,
R2 is a (C1-C20) alkylene group optionally substituted by a (C1-C6) alkyl group, —O—Z3, —N(Z3)(Z4), —S—Z3, —CN, —C(═K)—O—Z3, —O—C(═K)—Z3, —C(═K)—N(Z3)(Z4), or —N(Z3)-C(═K)—Z4, wherein
K is O or S,
each of Z3 and Z4 is, independently, H, a (C1-C6) alkyl group, optionally substituted by one or more groups selected from a halogen atom and a (C1-C6) alkyl group,
and
R3 is selected from the group consisting of a hydrogen atom, a (C1-C6) alkyl group, a (C1-C6) alkoxy group, a (C3-C8) cycloalkyl group, a (C3-C14) heterocycle, a (C6-C14) aryl group or a (C5-C14) heteroaryl group,
or R3 is a cell targeting moiety,
X1 and X2 are each, independently, a hydrogen atom, a (C1-C6) alkyl group, and
each of Ra, Rb, Rc and Rd is, independently, H or a (C1-C6) alkyl group, or a pharmaceutically acceptable salt thereof.

23. The dsRNA of claim 22, comprising one or more compounds of formula (I) wherein Y is
a) NR1, R1 is a non-substituted (C1-C20) alkyl group;
b) NR1, R1 is a non-substituted (C1-C16) alkyl group, which includes an alkyl group selected from a group comprising methyl, isopropyl, butyl, octyl, and hexadecyl;
c) NR1, R1 is a (C3-C8) cycloalkyl group, optionally substituted by one or more groups selected from a halogen atom and a (C1-C6) alkyl group;
d) NR1, R1 is a cyclohexyl group;
e) NR1, R1 is a (C1-C20) alkyl group substituted by a (C6-C14) aryl group;
f) NR1, R1 is a methyl group substituted by a phenyl group;
g) N—C(═O)—R1, R1 is an optionally substituted (C1-C20) alkyl group; or
h) N—C(═O)—R1, R1 is methyl or pentadecyl.

24. The dsRNA of claim 22 or 23, comprising one or more compounds of formula (I) wherein B is selected from a group consisting of a pyrimidine, a substituted pyrimidine, a purine and a substituted purine, or a pharmaceutically acceptable salt thereof.

25. The dsRNA of any one of claims 22 to 24, wherein R3 is of the formula (II): [chemical structure]
wherein A1, A2 and A3 are OH,
A4 is OH or NHC(═O)—R5, wherein R5 is a (C1-C6) alkyl group, optionally substituted by an halogen atom, or a pharmaceutically acceptable salt thereof.

26. The dsRNA of any one of claims 22 to 25, wherein R3 is N-acetyl-galactosamine, or a pharmaceutically acceptable salt thereof.

27. The dsRNA of any one of claims 22 to 26, comprising one or more nucleotides from Table A.

28. The dsRNA of claims 22 to 27, comprising from 2 to 10 compounds of formula (I), or a pharmaceutically acceptable salt thereof.

29. The dsRNA of claim 28, wherein the 2 to 10 compounds of formula (I) are on the sense strand.

30. The dsRNA of any one of claims 22 to 29, wherein the sense strand comprises two to five compounds of formula (I) at the 5′ end, and/or comprises one to three compounds of formula (I) at the 3′ end.

31. The dsRNA of claim 30, wherein
a) the two to five compounds of formula (I) at the 5′ end of the sense strand comprise lgT3, optionally comprising three consecutive lgT3 nucleotides; and/or
b) the one to three compounds of formula (I) at the 3′ end of the sense strand comprise 1T4; optionally comprising two consecutive 1T4.

32. The dsRNA of any one of claims 1 to 31, comprising one or more internucleoside linking groups independently selected from the group consisting of phosphodiester, phosphotriester, phosphorothioate, phosphorodithioate, alkyl-phosphonate and phosphoramidate backbone linking groups, or a pharmaceutically acceptable salt thereof.

33. The dsRNA of any one of claims 1 to 32, selected from the dsRNAs in Tables 1-4.

34. The dsRNA of any one of claims 1 to 33, wherein the sense strand and antisense strand of the dsRNA respectively comprise the nucleotide sequences of:
a) SEQ ID NOs: 1231 and 1429;
b) SEQ ID NOs: 1307 and 1505;
c) SEQ ID NOs: 1308 and 1506;
d) SEQ ID NOs: 1325 and 1523;
e) SEQ ID NOs: 1328 and 1526; or
f) SEQ ID NOs: 1369 and 1567.

35. A pharmaceutical composition comprising the dsRNA of any one of claims 1 to 34 and a pharmaceutically acceptable excipient.

36. The dsRNA of any one of claims 1 to 34 or the composition of claim 35 for their use in inhibiting LPA expression, reducing Lp(a) levels, or treating an Lp(a)-associated condition in a human in need thereof.

37. The dsRNA or composition for their use according to claim 36, wherein the human has or is at risk of having a lipid metabolism disorder or a cardiovascular disease (CVD).

38. The dsRNA or composition for their use according to claim 36, wherein the human has or is at risk of having hypercholesterolemia, dyslipidemia, myocardial infarction, atherosclerotic cardiovascular disease, atherosclerosis, peripheral artery disease, calcific aortic valve disease, thrombosis, or stroke.

39. A method of treating and/or preventing one or more Lp(a)-associated conditions comprising administering one or more dsRNAs as defined in any one of claims 1 to 34, and/or one or more pharmaceutical compositions as defined in claim 35.
